(19) United States
(12) Patent Application Publication
(10) Pub. No.: US 2025/0235527 A1
(43) Pub. Date: Jul. 24, 2025

(54) SYNTHETIC MODIFIED VACCINIA ANKARA (SMVA) BASED CORONAVIRUS VACCINES

(71) Applicant: CITY OF HOPE, Duarte, CA (US)

(72) Inventors: Don J. DIAMOND, Duarte, CA (US); Felix WUSSOW, Duarte, CA (US); Flavia CHIUPPESI, Duarte, CA (US)

(73) Assignee: CITY OF HOPE, Duarte, CA (US)

(21) Appl. No.: 18/711,073

(22) PCT Filed: Nov. 17, 2022
(86) PCT No.: PCT/US22/80065

§ 371 Date: May 16, 2024

Related U.S. Application Data
(60) Provisional application No. 63/280,524, filed on Nov. 17, 2021.

(51) Int. Cl. A61K 39/215; A61K 39/00; A61P 31/14; C12N 15/86

(52) U.S. Cl. CPC A61K 39/215; A61P 31/14; C12N 15/86; A61K 2039/5256; A61K 2039/575; C12N 2710/24143; C12N 2770/20034

(57) ABSTRACT

Disclosed are recombinant synthetic MVA-based vaccines for preventing or treating infections caused by a coronavirus or variants thereof.

### CROSS-REFERENCE TO RELATED APPLICATIONS

[0001] This application claims the benefit of U.S. Provisional Patent Application No. 63/280,524, filed on Nov. 17, 2021, the contents of which are incorporated by reference in their entirety.

### SEQUENCE LISTING

[0002] This application contains a Sequence Listing, which was submitted in XML format via Patent Center, and is hereby incorporated by reference in its entirety. The XML copy, created on Nov. 15, 2022, is named 0544358219WO00.xml and is 595 KB in size.

### BACKGROUND

[0003] Since the emergence of severe acute respiratory syndrome coronavirus 2 (SARS-CoV-2) in China at the end of 2019, SARS-CoV-2 has spread rapidly worldwide, causing a global pandemic with millions of fatalities. Several SARS-CoV-2 vaccines were developed in response to the COVID-19 pandemic at an unprecedented pace and showed 62%-95% efficacy in Phase 3 clinical trials, leading to their emergency use authorization (EUA) in many countries by the end of 2020 or beginning of 2021. The vaccines include those based on mRNA, adenovirus vectors, and nanoparticles that utilize different antigenic forms of the spike (S) protein to induce protective immunity against SARS-CoV-2 primarily through the function of neutralizing antibodies (NAb). The S protein mediates SARS-CoV-2 entry into a host cell through binding to angiotensin-converting enzyme 2 (ACE) and is the major target of NAb. Despite unprecedented mass vaccination and availability of effective COVID-19 vaccines, SARS-CoV-2 remains a threat to human health due to the continuous emergence of variants of concern (VOC) with the ability to evade vaccine-induced immunity.

[0004] Following the emergence of Alpha (B.1.1.7), Beta (B.1.351), Gamma (P.1), and Delta (B.1.617), Omicron subvariants have emerged as predominant SARS-CoV-2 VOC, which includes BA.1, BA.2, BA.2 sub-lineages such as BA.2.12.1, BA.4, BA.5, BA.2.75, and more recent Omicron lineage such as BQ.1, BQ.1.1, and XBB. Omicron subvariants have exceptional capacity to evade NAb due to numerous mutations in the S protein that dramatically exceed S mutations of other earlier-occurring SARS-CoV-2 VOC, thereby posing a unique challenge for COVID-19 vaccination. Several studies reported reduced clinical effectiveness against Omicron variants by approved COVID-19 vaccines, which were designed to elicit protective immunity solely based on the S protein of the Wuhan-Hu-1 reference strain. While waning vaccine efficacy against VOC can be counteracted by repeated booster vaccination, COVID-19 booster vaccines with altered or variant-matched antigen design have been developed to specifically enhance the stimulation of cross-protective immunity against emerging SARS-CoV-2 VOC.

[0005] Alternative vaccines based on different platforms, or modified epitope or antigen design, could therefore contribute to the establishment of long-term and cross-reactive immunity against SARS-CoV-2 and its emerging VOC. Accordingly, this disclosure provides vaccines using a synthetic modified vaccinia Ankara (sMVA) platform to satisfy an urgent need in the field.

### SUMMARY

[0006] Disclosed herein are vaccines and/or other immunogenic compositions, as well as the use thereof in preventing a coronavirus infection, and/or preventing, treating, or reducing the severity of COVID-19 caused by the coronavirus infection in a subject.

[0007] In some aspects, provided are vaccines and/or immunogenic compositions for preventing or treating SARS-CoV-2 infection in a subject comprising: (i) a single synthetic DNA fragment comprising the entire genome of a modified vaccinia Ankara (MVA), or two or more synthetic DNA fragments each comprising a partial sequence of the genome of the MVA such that the two or more DNA fragments, when transferred into a host cell, are assembled sequentially and comprise the full-length sequence of the MVA genome, and (ii) one or more DNA sequences encoding the spike (S) protein and the nucleocapsid (N) protein of SARS-CoV-2, subunits, or fragments thereof, inserted into one or more insertion sites of the MVA, wherein the S protein and the N protein are expressed in the host cell upon transfection of the one or more MVA DNA fragments. In some embodiments, the one or more insertion sites comprise Del2, IGR69/70, and Del3.

[0008] In some embodiments, the one or more synthetic DNA fragments with inserted antigen sequences are (co-)transfected into permissive cells (e.g., baby hamster kidney (BHK) cells, chicken embryo fibroblasts (CEF)) and subsequently infected with fowl pox virus (FPV) as a helper virus to initiate the reconstitution of recombinant sMVA virus that co-expresses SARS-CoV-2 spike and nucleocapsid antigens.

[0009] In some embodiments, the one or more DNA sequences encoding the S protein and the N protein are under the control of an mH5 promoter.

[0010] In some embodiments, the DNA sequence encoding the S protein is based on the Wuhan-Hu-1 reference strain or is derived from a variant of concern (VOC). In some embodiments, the DNA sequence encoding the N protein is based on the Wuhan-Hu-1 reference strain or is derived from a VOC. In some embodiments, the VOC is selected from the group consisting of B.1.1.7 (Alpha), B.1.351 (Beta), P.1 (Gamma), B.1.617.2 (Delta), B.1.621 (Mu), C.37 (Lambda), C.1.2, BA.1 (Omicron), BA.2 (Omicron), BA.2.12.1 (Omicron), BA.4 (Omicron), BA.5 (Omicron), BA.2.75 (Omicron), BQ.1 (Omicron), BQ.1.1 (Omicron), and XBB (Omicron).

[0011] In some embodiments, the DNA sequence encoding the S protein comprises a nucleotide sequence that is at least 80% identical to any one of SEQ ID NOs: 5, 9, 11, 13, 15, 21, 25, and 29. In some embodiments, the DNA sequence encoding the N protein comprises a nucleotide sequence that is at least 80% identical to any one of SEQ ID NOs: 7, 17, 19, 23, 27, and 31.

[0012] In some aspects, provided are vaccines and/or immunogenic compositions for preventing or treating SARS-CoV-2 infection in a subject comprising a synthetic modified vaccinia Ankara (sMVA) vector comprising a nucleotide sequence that is at least 80% identical to SEQ ID NO: 33.

[0013] In some embodiments, the vaccine and/or immunogenic composition further comprises a pharmaceutically acceptable carrier, adjuvant, additive, or combination thereof.

[0014] In some aspects, provided are methods of preventing or treating SARS-CoV-2 infection in a subject comprising administering to the subject a prophylactically or therapeutically effective amount of the vaccine and/or immunogenic composition according to various embodiments of the present technology.

[0015] In some aspects, provided are methods of eliciting an immune response to SARS-CoV-2 in a subject by administering to the subject a prophylactically or therapeutically effective amount of the vaccine and/or immunogenic composition according to various embodiments of the present technology, wherein the subject is infected with SARS-CoV-2 or is at risk of being infected with SARS-CoV-2.

[0016] In some embodiments, the SARS-CoV-2 virus comprises the Wuhan-Hu-1 reference strain or a VOC. In some embodiments, the VOC is selected from the group consisting of B.1.1.7 (Alpha), B.1.351 (Beta), P.1 (Gamma), B.1.617.2 (Delta), B.1.621 (Mu), C.37 (Lambda), C.1.2, BA.1 (Omicron), BA.2 (Omicron), BA.2.12.1 (Omicron), BA.4 (Omicron), BA.5 (Omicron), BA.2.75 (Omicron), BQ.1 (Omicron), BQ.1.1 (Omicron), and XBB (Omicron).

[0017] In some embodiments, the vaccine and/or immunogenic composition is administered by intramuscular injection, intranasal instillation, intradermal injection, and/or scarification.

[0018] In some embodiments, a single dose of the vaccine composition is administered. In some embodiments, two doses of the vaccine composition are administered. In some embodiments, three or more doses of the vaccine composition are administered. In some embodiments, one booster dose of the vaccine and/or immunogenic composition is administered. In some embodiments, two or more booster doses of the vaccine and/or immunogenic composition are administered.

### BRIEF DESCRIPTION OF THE DRAWINGS

[0019] This application contains at least one drawing executed in color. Copies of this application with color drawing(s) will be provided to the Office upon request and payment of the necessary fees.

[0020] FIGS. 1A-1H show COH04S1 immunogenicity in Syrian hamsters. FIG. 1A shows a design scheme of the COH04S1 construct. COH04S1 is an sMVA vaccine vector that contains full-length SARS-CoV-2 N and S antigens and mH5 promoter sequences inserted into the deletion 2 (Del2) and deletion 3 (Del3) sites as indicated. ITR=inverted terminal repeat. FIG. 1B shows study design. Hamsters were vaccinated twice with COH04S1 by intramuscular (IM) (COH04S1-IM) or intranasal (IN) (COH04S1-IN) route as indicated. Unvaccinated animals and hamsters vaccinated with empty sMVA vector by IM (sMVA-IM) or IN (sMVA-IN) route were used as controls. Blood samples were collected at 0, 28, and 42 days. Hamsters were challenged intranasally at day 42, and body weight changes were recorded daily for 10 days. At endpoint, nasal wash, turbinates, and lung tissue were collected for downstream analyses. FIGS. 1C-1D show IgG endpoint titers. S-, receptor-binding domain (RBD)-, and N-specific binding antibody titers were measured in serum samples of vaccine and control groups at day 28 (d28) post-prime and at day 42 (d42) post-booster vaccination via ELISA. Data are presented as geometric mean values+geometric SD. Dotted lines indicate lower limit of detection. Two-way ANOVA with Tukey's multiple comparison test was used. FIG. 1E shows IgG2-3/IgG1 ratios. S-, RBD-, and N-specific IgG2-3 and IgG1 endpoint titers were measured at day 42 (d42) in serum samples of vaccine and control groups and used to assess IgG2-3/IgG1 ratios. An IgG2-3/IgG1 ratio >1 is indicative of a Th1-biased response. Geometric means are indicated with a line. FIGS. 1F-1G show NAb titers. NAb titers were measured in serum samples of vaccine and control groups post-first (d28) and post-second (d42) vaccination via plaque reduction neutralization titer (PRNT) assay against SARS-CoV-2 infectious virus. Data are presented as geometric mean values+SD. Dotted lines indicate lower limit of detection. Values below the limit of detection (PRNT=20) are indicated as 10. One-way ANOVA with Holm-Sidak's multiple comparison test was used. FIG. 1H shows VOC-specific NAb titers. NAb were measured in pooled serum samples of vaccine and control groups collected at the time of challenge (d42) using pseudoviruses (pv) with S D614G mutation or S sequences based on several VOC, including Alpha (B.1.1.7), Beta (B.1.351), Gamma (P.1), and Delta (B.1.617.2). Titers are expressed as NT50. Fold NT50 reduction in comparison to D614G PV are shown. 0.01<*p<0.05, 0.001<**p<0.01, 0.0001<***p<0.001, ****p<0.0001.

[0021] FIGS. 2A-2N show COH04S1 immunogenicity in Syrian hamsters. FIGS. 2A-2F show binding antibody titers. Shown are the binding curves of S, RBD, and N antigen-specific binding antibody titers measured at day 28 (d28) or day 42 (d42) after the first and second vaccinations in serum samples of COH04S1-IM- and COH04S1-IN-vaccinated hamsters and unvaccinated and sMVA vector control animals. Two-way ANOVA with Tukey's multiple comparison test was used. FIGS. 2G-21 show IgG2-3/IgG1 antibody titers. Shown are the IgG endpoint titers of S, RBD, and N antigen-specific IgG2-3 and IgG1 binding antibodies measured in serum samples of day 42 (d42), and ratios are shown. Geometric means are indicated with a line. Dotted lines indicate lower limit of detection. FIGS. 2J-2N show VOC-specific NAb titers. Shown are NAb titers measured at the indicated time points by PV variants with D614G mutation or based on several SARS-CoV-2 VOC in vaccine and control groups.

[0022] FIGS. 3A-3H show COH04S1-mediated vaccine protection in hamsters following sub-lethal SARS-CoV-2 challenge. FIG. 3A shows body weight change. Body weight of COH04S1-IM- and COH04S1-IN-vaccinated animals as well as unvaccinated and sMVA-IM and sMVA-IN vector control animals was measured daily for 10 days post-challenge. Weight loss is reported as mean±SD. Two-way ANOVA followed by Tukey's multiple comparison test was used to compare group mean values at each time point. FIG. 3B shows maximal weight loss. Percentage of maximal weight loss is shown in single animals of vaccine and control groups. Lines and bars represent median values and 95% Cl, respectively. A dotted line represents the maximum weight loss allowed before euthanasia. Peaks of weight loss in each group were compared using one-way ANOVA followed by Tukey's multiple comparison test. FIGS. 3C-3D show lung viral loads. SARS-CoV-2 genomic RNA (gRNA) and subgenomic RNA (sgRNA) copies were quantified in lung tissue of vaccine and control groups at day 10 post-challenge by qPCR. Bars show RNA copies geometric mean±geometric SD. Dotted lines represent lower limit of detection. Kruskal-Wallis test followed by Dunn's multiple comparison test was used. FIGS. 3E-3H show histopathological findings. Hematoxylin/eosin-stained lung sections of COH04S1-vaccinated hamsters and control animals at day 10 post-challenge were evaluated by a board-certified pathologist, and microscopic findings were graded based on severity on a scale from 1 to 5 (Table 5). FIG. 3E shows the cumulative pathology score of all histopathologic findings in each group. FIG. 3F shows grading of bronchioalveolar hyperplasia disease severity in each group. One-way ANOVA followed by Holm-Sidak's multiple comparison test was used. FIG. 3G shows the severity of lung inflammatory microscopic findings based on 1-to-5 scaling of four inflammation types as indicated. Bars represent mean values±SD. One-way ANOVA followed by Tukey's multiple comparison test was used. In FIGS. 3B-3F, 0.01<*p<0.05, 0.001<**p<0.01, 0.0001<***p<0.001, ****p<0.0001. FIG. 3H shows representative images of histopathological findings in lung sections of COH04S1-vaccinated animals and control animals. Black arrows indicate moderate and mild bronchioalveolar hyperplasia in lung sections of sMVA-IM and sMVA-IN control animals and COH04S1-IN animals. Black arrows in lung sections of unvaccinated control animals indicate hyperplastic alveolar cells. 10× magnification.

[0023] FIGS. 4A-4D show COH04S1-mediated protection of hamsters following sub-lethal SARS-CoV-2 challenge. Shown are SARS-CoV-2 gRNA and sgRNA copies quantified by qPCR in nasal wash and turbinates of COH04S1-IM- and COH04S1-IN-vaccinated hamsters and unvaccinated and sMVA control animals at day 10 post-challenge. Bars show RNA copies geometric mean±geometric SD. Dotted lines represent lower limit of detection of the assay. Kruskal-Wallis test followed by Dunn's multiple comparison test was used. 0.01<*p<0.05, 0.001<**p<0.01.

[0024] FIGS. 5A-5B show correlative analysis of immunological and virological parameters in COH04S1-vaccinated hamsters challenged with SARS-CoV-2. Spearman correlation analysis was performed between the indicated pre-challenge immune responses and post-challenge virological assessments of COH04S1-IM- and COH04S1-IN-vaccinated hamsters and unvaccinated and sMVA control animals. FIG. 5A shows that Spearman correlation coefficients were calculated and plotted as a matrix. FIG. 5B shows that two-tailed p values were calculated and indicated as 0.01<*p<0.05, 0.001<**p<0.01, 0.0001<***p<0.001, ****p<0.0001. ns=not significant.

[0025] FIGS. 6A-6I show COH04S1 vaccine immunogenicity in nonhuman primates (NHP). FIG. 6A shows study design. African green monkey NHP were vaccinated with COH04S1 vaccine using two-dose (COH04S1-2D; N=6) or single-dose (COH04S1-1D; N=6) vaccination regimen as indicated. Mock-vaccinated NHP and NHP vaccinated with empty sMVA vector using the same dose vaccination regimen were included as controls. Six weeks after vaccination, NHP were challenged by IN/intratracheal (IT) route with SARS-CoV-2 USA-WA1/2020 reference strain. Bronchoalveolar lavages (BAL) and oral and nasal swab samples for viral load analysis were collected at multiple time points post-challenge. A subset of animals in each group were necropsied at days 7 and 21 post-challenge for viral load and histopathology analysis. FIGS. 6B-6D show binding antibody titers. S, RBD, and N antigen-specific binding antibody titers were measured at the indicated time points in serum samples of COH04S1-2D- and COH04S1-1D-vaccinated NHP via ELISA. Data is presented as geometric mean values±geometric SD. Two-way ANOVA followed by Sidak's multiple comparison test was used. FIG. 6E shows VOC-specific antibody titers. S-specific binding antibody titers were measured at day 62 by ELISA using S antigens based on the Wuhan-Hu-1 reference strain or several SARS-CoV-2 VOC, including Beta (B.1.351), Gamma (P.1), and Delta (B.1.617.2). Endpoint titers are presented as geometric mean values±geometric SD. Two-way ANOVA with Sidak's multiple comparison test was used for statistical analysis. FIG. 6F shows BAL antibody titers. S, RBD, and N antigen-specific binding antibody titers were measured by ELISA at day 42 in BAL samples of COH04S1-IM and COH04S1-IN vaccine group. Endpoint titers are presented as geometric mean values±geometric SD. Two-way ANOVA with Sidak's multiple comparison test was used. FIG. 6G shows NAb titers. NAb titers were measured by PRNT assay against SARS-CoV-2 USA-WA1/2020 reference strain in serum samples of vaccinated NHP. Serum dilutions reducing the plaque number by 50% (ID50) are presented as geometric mean values±geometric SD. Two-way ANOVA followed by Sidak's multiple comparison test was used to compare ID50 values. PRNT-assayed NAb titers measured in serum samples of healthcare workers (N=14) vaccinated two times with Pfizer-BioNTech BNT162b2 mRNA vaccine were included. FIGS. 6H-6I show T cell responses. IFNγ-, IL-2-, and IL-4-expressing S and N antigen-specific T cell responses were measured at 2 weeks post-challenge by ELISPOT. Bars represent mean values, and lines represent ±SD. Two-way ANOVA followed by Tukey's multiple comparison test was used. Dotted lines indicate the arbitrary positive threshold of 30 spots/10⁶ cells. 0.01<*p<0.05, 0.001<**p<0.01, 0.0001<***p<0.001, ****p<0.0001.

[0026] FIGS. 7A-7J show COH04S1-induced humoral immunity in NHP. FIGS. 7A-7F show binding antibody titers. Shown are S, RBD, and N antigen-specific IgG endpoint titers measured at the indicated time points in COH04S1-2D- and COH04S1-1 D-vaccinated NHP and mock-vaccinated and sMVA vector control animals. Data are presented as geometric mean values±geometric SD. Two-way ANOVA followed by Sidak's multiple comparison test was used. FIGS. 7G-7H show BAL binding antibodies. Shown are endpoint titers of IgG binding antibodies to S, RBD, and N measured in BAL samples in vaccine and control groups at day 42. Endpoint titers are presented as geometric mean values±geometric SD. Two-way ANOVA with Sidak's multiple comparison test was used. FIGS. 7I-7J show VOC-specific binding antibody titers. Shown are endpoint titers of S-specific IgG binding antibodies measured 1 week post-challenge by ELISA with S antigens based on Wuhan-Hu-1 reference strain or several VOC, including Beta (B.1.351), Gamma (P.1), and Delta (B.1.617.2). Endpoint titers are presented as geometric mean values±geometric SD. Two-way ANOVA with Sidak's multiple comparison test was used. 0.01<*p<0.05, 0.001<**p<0.01, 0.0001<***p<0.001, ****p<0.0001.

[0027] FIGS. 8A-8F show COH04S1-induced T cell responses in NHP, including IFNγ-, IL-2-, and IL-4-expressing S- and N-specific T cell responses measured 2 weeks pre-challenge by FluoroSpot assay in COH04S1-2D- and COH04S1-1D-vaccinated NHP and mock-vaccinated and sMVA vector control animals. Bars represent mean values, and lines represent ±SD. Two-way ANOVA followed by Tukey's multiple comparison test was used. Dotted lines indicate the arbitrary positive threshold of 30 spots/10⁶ cells. 0.01<*p<0.05.

[0028] FIGS. 9A-9I show BAL viral loads in COH04S1-vaccinated NHP following SARS-CoV-2 challenge. SARS-CoV-2 gRNA (FIGS. 9A-9C) and sgRNA (FIGS. 9D-9F) copies and Median Tissue Culture Infectious Dose (TCID50) infectious virus titers (FIGS. 9G-9I) were measured at the indicated days post-challenge in BAL of COH04S1-2D- and COH04S1-1D-vaccinated NHP and mock-vaccinated and sMVA vector control animals. Bars represent geometric means, and lines represent ±geometric SD. Dotted lines represent lower limit of detection. Two-way ANOVA followed by Sidak's multiple comparison test was used. FIGS. 9C, 9F, and 9I show viral loads by area under the curve (AUC). Violin plots show values ranges with median values (dashed line) and quartiles (dotted line). AUC=0 was indicated as 1. One-way ANOVA followed by Tukey's multiple comparison test was used. 0.01<*p<0.05, 0.001<**p<0.01, 0.0001<***p<0.001, ****p<0.0001.

[0029] FIGS. 10A-10I show nasal swab viral loads in COH04S1-vaccinated NHP after SARS-CoV-2 challenge. SARS-CoV-2 gRNA (FIGS. 10A-10C) and sgRNA (FIGS. 10D-10F) copies and TCID50 infectious virus titers (FIGS. 10G-10I) were measured at the indicated days post-challenge in nasal swab samples of COH04S1-2D- and COH04S1-1 D-vaccinated NHP and mock-vaccinated and sMVA vector-vaccinated control animals. Lines represent geometric means+geometric SD. Dotted lines represent lower limit of detection. Two-way ANOVA followed by Sidak's multiple comparison test was used. FIGS. 10C, 10F, and 10I show viral loads by AUC. Violin plots show values ranges with median values (dashed line) and quartiles (dotted line). AUC=0 was indicated as 1. One-way ANOVA followed by Tukey's multiple comparison test was used. 0.01<*p<0.05, 0.001<**p<0.01, 0.0001<***p<0.001, ****p<0.0001.

[0030] FIGS. 11A-11F show oral swab viral loads in COH04S1-vaccinated NHP following SARS-CoV-2 challenge. SARS-CoV-2 gRNA (FIGS. 11A-11C) and sgRNA (FIGS. 11D-11F) copies were measured by qPCR at the indicated days post-challenge in oral swab samples of COH04S1-2D- and COH04S1-1 D-vaccinated NHP and mock-vaccinated and sMVA vector control animals. Lines represent geometric means±geometric SD. Dotted lines represent assay lower limit of detection. Two-way ANOVA followed by Sidak's multiple comparison test was used. FIGS. 11C and 11F show viral loads by AUC. Violin plots show values ranges with median values (dashed line) and quartiles (dotted line). AUC=0 was indicated as 1. One-way ANOVA followed by Tukey's multiple comparison test was used. 0.01<*p<0.05, 0.001<**p<0.01, 0.0001<***p<0.001, ****p<0.0001.

[0031] FIGS. 12A-12L show SARS-CoV-2 viral loads in lungs and other organs of COH04S1-vaccinated NHP following challenge. Given are SARS-CoV-2 gRNA (FIGS. 12A, 12C, and 12E-12H) and sgRNA (FIGS. 12B, 120, and 121-12L) copies measured by qPCR at days 7 and 21 post-challenge in the lungs and several other organs of necropsied COH04S1-2D- and COH04S1-1 D-vaccinated NHP and mock-vaccinated and sMVA vector control animals. Four lung samples were analyzed for each necropsied NHP (see Table 6 for necropsy schedule). Dotted lines represent assay lower limit of detection. Kruskal-Wallis test followed by Dunn's multiple comparison test was used. In FIGS. 12E-12L, statistical evaluation was not performed because of the limited number of samples in the control groups. 0.01<*p<0.05, 0.001<**p<0.01.

[0032] FIGS. 13A-13B show correlative analysis of immunological and virological parameters in COH04S1-vaccinated NHP challenged with SARS-CoV-2. Spearman correlation analysis was performed between the indicated pre-challenge and post-challenge immune responses and post-challenge virological assessments of COH04S1-2D- and COH04S1-1D-vaccinated NHP and mock-vaccinated and sMVA control animals. Post-challenge time points are indicated with “+” before the day number. FIG. 13A shows that Spearman correlation coefficients were calculated and plotted as a matrix. FIG. 13B shows that two-tailed p values were calculated and indicated as 0.01<*p<0.05, 0.001<**p<0.01, 0.0001<***p<0.001, ****p<0.0001. ns=not significant.

[0033] FIGS. 14A-14L show SARS-CoV-2-specific post-challenge immune responses in COH04S1-vaccinated NHP. SARS-CoV-2-specific humoral and cellular immune responses were measured at days 3, 7, 15, and 21 post-challenge in COH04S1-2D- and COH04S1-1 D-vaccinated NHP and mock-vaccinated and sMVA vector control animals and compared to pre-challenge immunity assessed in these groups. FIGS. 14A-14F show S, RBD, and N antigen-specific binding antibody titers evaluated by ELISA. FIGS. 14G and 14J show NAb titers measured by PRNT assay against SARS-CoV-2 USA-WA1/2020 reference strain. Lines represent geometric means±geometric SD. Dotted lines indicate lower limit of detection. Values below the lower limit of detection are indicated as half the lower limit of detection. FIGS. 14H-141 and 14K-14L show IFNγ-expressing S- and N-specific T cell responses measured by FluoroSpot assay. Bars represent mean values, and lines represent ±SD. Dotted lines indicate the arbitrary positive threshold of 30 spots/10⁶ cells. Two-way ANOVA followed by Tukey's multiple comparison test was used. Time points with <3 samples/group (d+15 and d+21) were excluded from the statistical evaluation. 0.01<*p<0.05, 0.001<**p<0.01, 0.0001<***p<0.001, ****p<0.0001.

[0034] FIGS. 15A-15D show SARS-CoV-2-specific post-challenge cellular IL-4-specific responses in COH04S1-vaccinated NHP. SARS-CoV-2-specific cellular immune responses were measured at days 3, 7, 15, and 21 post-challenge in COH04S1-2D- and COH04S1-1 D-vaccinated NHP and mock-vaccinated and sMVA vector control animals and compared to pre-challenge immunity assessed in these groups. IL-4-expressing S- and N-specific T cell responses were measured by FluoroSpot assay. Bars represent mean values, and lines represent ±SD. Dotted lines indicate the arbitrary positive threshold of 30 spots/10⁶ cells. Two-way ANOVA followed by Tukey's multiple comparison test was used. Time points with <3 samples/group (d+15 and d+21) were excluded from the statistical evaluation. ****p<0.0001.

[0035] FIGS. 16A-16B show vaccine-mediated protection in hamsters following sub-lethal challenge with SARS-CoV-2 Delta variant (B.1.617.2). FIG. 16A shows body weight change. Syrian hamsters (N=10) were intramuscularly vaccinated two times in a 28-day interval with COH04S1 or COH04S351. COH04S1 expresses S and N antigen sequences based on the original SARS-CoV-2 Wuhan-Hu-1 isolate, while COH04S351 expresses S and N antigen sequences based on SARS-CoV-2 B.1.351 Beta variant, originally isolated in the Republic of South Africa. Control animals were vaccinated with sMVA control vector. All vaccines were administered at 1×10⁸ plaque-forming units (PFU). Two weeks post-boost, hamsters were challenged intranasally with a high dose (6.5×10⁴ TCID50 per hamster) of SARS-CoV-2 B.1.617.2 Delta variant (isolate USA/PHC658/2021). Body weight was measured daily for 10 days post-challenge. Weight loss is reported as mean±SEM. Two-way ANOVA followed by Tukey's multiple comparison test was used to compare group mean values at each time point. FIG. 16B shows maximal weight loss. Percentage of maximal weight loss is shown in single animals within vaccine and control groups (N=5). Only animals that were sacrificed at endpoint were included. Lines and bars represent median values and 95% Cl, respectively. Peaks of weight loss in each group were compared using one-way ANOVA followed by Tukey's multiple comparison test. 0.01<*p<0.05, 0.001<**p<0.01, 0.0001<***p<0.001, ****p<0.0001.

[0036] FIGS. 17A-17B illustrate the study design of comparing the immunogenicity of COH04S1 and COH04S351 in mice. Female Balb/c mice (N=6) were intraperitoneally vaccinated two times in a 21-day interval with COH04S351, COH04S1, a combination of COH04S351/COH04S1 in two amounts, or with the two vaccines used in a heterologous prime/boost schedule. Control animals were vaccinated with sMVA control vector (N=6) or PBS (N=5). Single vaccines were administered at 1×10⁷ PFU. The combination of COH04S351/COH04S1 was administered at either 1×10⁷ PFU (mix2×) or 0.5×10⁷ (mix) PFU/each vaccine. Serum samples were collected at baseline, week 2, and endpoint (week 4), when splenocytes were also collected for immunological analyses. p=prime, b=boost.

[0037] FIGS. 18A-18C show vaccine-induced SARS-CoV-2-specific binding antibody endpoint titers. S-, RBD-, and N-specific binding endpoint titers were measured in mouse sera collected 2 weeks post-prime and 1 week post-boost vaccination by ELISA using proteins based on the ancestral SARS-CoV-2 virus (Wuhan).

[0038] FIG. 19 shows vaccine-induced binding antibody endpoint titers to VOC. S-specific binding endpoint titers were measured in mouse sera collected 1 week post-boost vaccination by ELISA using S proteins based on the ancestral SARS-CoV-2 virus (Wuhan), beta (B.1.351), and gamma (P.1) VOC.

[0039] FIG. 20 shows IFNγ cellular responses to ancestral and VOC S and N peptide libraries. S and N peptide libraries based on the sequences from ancestral Wuhan SARS-CoV-2 and beta and gamma VOC were used to stimulate splenocytes of mice vaccinated with COH04S351, COH04S1, and combinations of the two vaccines. ELISPOT was used to quantify the IFNγ-specific cellular response to the antigens.

[0040] FIGS. 21A-21B illustrate the study design of comparing the immunogenicity of COH04S1 and C170 in mice. Female Balb/c mice (N=6) were intraperitoneally vaccinated two times in a 21-day interval with C170 (multi-antigenic SARS-CoV-2 sMVA vaccine encoding for S and N sequences from the gamma P.1 VOC originally isolated in Brazil), COH04S1, a combination of C170/COH04S1 in two amounts, or with the two vaccines used in a heterologous prime/boost schedule. Control animals were vaccinated with sMVA control vector or PBS (N=6). Single vaccines were administered at 1×10⁷ PFU. The combination of C170/COH04S1 was administered at either 1×10⁷ PFU (mix2×) or 0.5×10⁷ (mix) PFU/each vaccine. Serum samples were collected at baseline, week 2, and endpoint (week 4), when splenocytes were also collected for immunological analyses. p=prime, b=boost.

[0041] FIG. 22 shows vaccine-induced SARS-CoV-2-specific binding antibody endpoint titers. S-, RBD-, and N-specific binding endpoint titers were measured in mouse sera collected 2 weeks post-prime and 1 week post-boost vaccination by ELISA using proteins based on the ancestral SARS-CoV-2 virus (Wuhan).

[0042] FIG. 23 shows vaccine-induced binding antibody endpoint titers to VOC. S-specific binding endpoint titers were measured in mouse sera collected 1 week post-boost vaccination by ELISA using S proteins based on the ancestral SARS-CoV-2 virus (Wuhan), beta (B.1.351), and gamma (P.1) VOC.

[0043] FIG. 24 shows NAb response to ancestral Wuhan SARS-CoV-2 and VOC. Lentiviral spike pseudoviruses based on the ancestral Wuhan strain with D614G substitution, Alpha, Beta, Gamma, and Delta VOC were used in a neutralization assay to measure SARS-CoV-2-specific NAb in pooled post-boost mouse sera. Shown are the serum dilutions to inhibit 50% of pseudovirus entry into HEK293T-ACE2-susceptible cells (IC50).

[0044] FIG. 25 shows IFNγ cellular responses to ancestral Wuhan and VOC S and N peptide libraries. S and N peptide libraries based on the sequences from ancestral Wuhan SARS-CoV-2 and beta and gamma VOC were used to stimulate splenocytes of mice vaccinated with C170, COH04S1, and combinations of the two vaccines. ELISPOT was used to quantify the IFNγ-specific cellular response to the antigens.

[0045] FIGS. 26A-26B illustrate the study design of comparing the immunogenicity of COH04S1 and COH04S351 in hamsters. Syrian hamsters (N=30) were intramuscularly vaccinated two times in a 28-day interval with COH04S1 or COH04S351. Control animals (N=30) were vaccinated with sMVA control vector. All vaccines were administered intramuscularly at 1×10⁸ PFU. Two weeks post-boost, hamsters were challenged intranasally with a high dose of SARS-CoV-2 Washington strain (WAS-Calu-3), B.1.351 Beta, or B.1.617.2 Delta variant (isolate USA/PHC658/2021). Body weight was measured daily for 10 days post-challenge. Five hamsters in each group were sacrificed at days 3 and 10 post-challenge for organ collection.

[0046] FIGS. 27A-27F show vaccine-induced SARS-CoV-2-specific IgG responses following vaccination with COH04S1 and COH04S351. FIG. 27A shows SARS-CoV-2-specific binding antibody endpoint titers. S-, RBD-, and N-specific IgG titers to ancestral SARS-CoV-2 were measured in serum samples of vaccine and control groups at day 14 (d14) post-prime vaccination via ELISA. FIG. 27B shows variant-specific antibody endpoint titers. Serum IgG binding titers to Beta, Detal, and Omicron-specific S antigens were measured in serum samples of vaccine and control groups at d14 post-prime vaccination via ELISA. FIG. 27C shows Th1/Th2 response. S-, RBD-, and N-specific binding antibodies of the IgG2/3 and IgG1 isotype were measured in serum samples of vaccine and control groups at d14 post-prime vaccination, and IgG2/3/IgG1 ratios were calculated. A ratio >1 is considered a Th1-biased immune response. Dotted lines indicate lower limit of detection.

[0047] FIGS. 27D-27F show NAb titers. NAb titers were measured in serum samples of vaccine and control groups at day 42 (d42) post second vaccination via PRNT assay against ancestral SARS-CoV-2 (FIG. 27D) and Beta (FIG. 27E) and Delta (FIG. 27F) variants. Dotted lines indicate lower and upper limit of detection, respectively. Values below the lower limit of detection (ID50=20 in FIGS. 270, 27F, ID50=60 in FIG. 27E) are indicated as half the lower limit of detection, values above the upper limit of detection (ID50=14,580) are indicated as twice the upper limit of detection. Data are presented as geometric mean values±geometric SD. Two-way ANOVA with Tukey's multiple comparison test was used. 0.01<*p<0.05, 0.001<**p<0.01, 0.0001<***p<0.001, ****p<0.0001.

[0048] FIGS. 28A-28F show that COH04S1 and COH04S351 protected hamsters from lower respiratory tract infection following challenge with SARS-CoV-2 ancestral virus and Beta and Delta variants. SARS-CoV-2 sgRNA copies were quantified by qPCR in lung tissue (FIGS. 28A-28C) and nasal turbinates (FIGS. 28D-28F) of COH04S1 and COH04S351 vaccine and control groups at days 3 and 10 following challenge with ancestral SARS-CoV-2 (FIGS. 28A, 28D) or SARS-COV-2 Beta (FIGS. 28B, 28E) and Delta (FIGS. 28C, 28F) variants. Lines indicate median sgRNA copies. One-way ANOVA followed by Tukey's multiple comparison test was used. 0.01<*p<0.05, 0.001<**p<0.01, 0.0001<***p<0.001. FIGS. 28G-280 show that COH04S1 and COH04S351 protect hamsters from lung pathology following challenge with SARS-CoV-2 ancestral virus and Beta and Delta variants. Hematoxylin/eosin-stained lung sections of COH04S1- and COH04S351-vaccinated hamsters and control animals at days 3 and 10 following challenge with ancestral SARS-CoV-2 (FIGS. 28G, 28J, 28M) or SARS-CoV-2 Beta (FIGS. 28H, 28K, 28N) and Delta (FIGS. 28I, 28L, 28O) variants were evaluated by a board-certified pathologist and microscopic findings were graded based on severity on a scale from one to five (Table 5). FIGS. 28G-28I show the cumulative pathology score of all histopathologic findings in each group. FIGS. 28J-28L show grading of bronchioalveolar hyperplasia disease severity in each group. FIGS. 28M-28O show the severity of lung inflammatory microscopic findings. Lines indicate median values. Two-way ANOVA followed by Tukey's multiple comparison test was used. 0.01<*p<0.05, 0.001<**p<0.01, 0.0001<***p<0.001, ****p<0.0001.

[0049] FIGS. 29A-29F show vaccine-mediated protection in hamsters following sub-lethal challenge with SARS-CoV-2 USA/WA/1, Beta (B.1.351), and Delta variant (B.1.617.2). Syrian hamsters (N=10) were intramuscularly vaccinated two times in a 28-day interval with COH04S1 or COH04S351. Control animals were vaccinated with sMVA control vector. All vaccines were administered at 1×10⁸ PFU. FIGS. 29A, 29C, and 29E show body weight change. Two weeks post-boost, hamsters were challenged intranasally with SARS-CoV-2 Washington strain (FIG. 29A, WAS-Calu-3), B.1.351 Beta (FIG. 29C), or B.1.617.2 Delta variant (FIG. 29E, isolate USA/PHC658/2021). Body weight was measured daily for 10 days post-challenge. Five hamsters in each group were sacrificed at day 5. Weight loss is reported as mean±SEM. Two-way ANOVA followed by Tukey's multiple comparison test was used to compare group mean values at each time point. FIGS. 29B, 29D, and 29F show maximal weight loss. Percentage of maximal weight loss is shown in single animals of vaccine and control groups (N=5). Only animals that were sacrificed at endpoint were included. Lines and bars represent median values and 95% Cl, respectively. Peaks of weight loss in each group were compared using one-way ANOVA followed by Tukey's multiple comparison test. 0.01<*p<0.05, 0.001<**p<0.01, 0.0001<***p<0.001, ****p<0.0001.

[0050] FIGS. 30A-30E show that COH04S1 and Omicron BA.1 and Beta sequence-modified vaccines elicit strain-specific antibody responses against SARS-CoV-2 ancestral virus and VOC. FIG. 30A shows that the three vaccine constructs, COH04S1, COH04S529, and COH04S351, are sMVA-vectored COVID-19 vaccines co-expressing S and N antigens based on the Wuhan-Hu-1 reference strain or Omicron BA.1 or Beta variants, respectively. The antigen sequences were inserted into the MVA sites Del2 and Del3 as indicated. FIG. 30B shows study design. Hamsters were vaccinated twice with COH04S1 (n=20), COH04S351 (n=20), or COH04S529 (n=20) by IM route as indicated. Hamsters vaccinated with empty sMVA vector (n=10) or unvaccinated hamsters were used as controls (n=10). Blood samples were collected at days 14 and 42 after the first and second vaccinations. COH04S1-, COH04S529-, and COH04S351-vaccinated hamsters were challenged intranasally at day 42 with Omicron subvariants BA.1 or BA.2.12.1 (n=10/group). sMVA control animals were challenged with BA.1. Unvaccinated controls were challenged with BA.2.12.1. Post-challenge body weight changes were recorded daily for 8 days. Lung tissue and nasal turbinates for viral load measurements and lung histopathology were collected at days 4 and 8 post-challenge (n=5/group/time point). FIGS. 30C-30D show IgG endpoint titers. S-specific (FIG. 30C) and N-specific (FIG. 30D) binding antibody titers to ancestral virus, Beta, and Omicron subvariants BA.1, BA.2, BA.4, and BA.5 were measured in serum samples of vaccine and control groups at day 14 (d14) post-prime vaccination via ELISA. Dotted lines indicate lower limit of detection. FIG. 30E shows NAb titers. NAb titers were measured in serum samples of vaccine and control groups at day 42 (d42) post-second vaccination via PRNT assay against ancestral SARS-CoV-2 (WA/1) and Omicron BA.1. Dotted lines indicate lower and upper limit of detection. Values below the lower limit of detection are indicated as half the lower limit of detection. Data are presented as box plots extending from 25th to 75th percentiles, with lines indicating medians, and whiskers going from minimum to maximum values. Two-way ANOVA with Tukey's multiple comparison test was used in FIGS. 30C-30D. Kruskal-Wallis test was used in e. 0.01<*p<0.05, 0.001<**p<0.01, 0.0001<***p<0.001, ****p<0.0001.

[0051] FIGS. 31A-31B show that COH04S1 and Omicron BA.1- and Beta-modified vaccines protect hamsters from weight loss following challenge with Omicron BA.1 or BA.2.12.1. Body weight of COH04S1-, COH04S351-, and COH04S351-vaccinated animals was measured daily for 8 days following challenge with Omicron variants BA.1 (FIG. 31A) and BA.2.12.1 (FIG. 31B). Hamsters vaccinated with empty sMVA vector or unvaccinated hamsters were used as controls. Weight loss compared to day 0 is reported as mean±SEM. Two-way ANOVA followed by Tukey's multiple comparison test was used to compare group mean values at each time point. 0.01<*p<0.05, 0.001<**p<0.01, 0.0001<***p<0.001, ****p<0.0001. Black asterisks indicate time of sacrifice (n=5/group).

[0052] FIGS. 32A-32D show that COH04S1 and Omicron BA.1- and Beta-modified vaccines protect hamsters from lower respiratory tract infection following virus challenge with Omicron BA.1 or BA.2.12.1. SARS-CoV-2 gRNA (FIGS. 32A-32B) and sgRNA (FIGS. 32C-32D) copies were quantified by qPCR in lung tissue of COH04S1, COH04S351, and COH04S529 vaccine and control groups at days 4 and 8 following challenge with Omicron subvariants BA.1 (FIGS. 32A, 32C) and BA.2.12.1 (FIGS. 32B, 32D). Lines indicate median RNA copies. Two-way ANOVA followed by Tukey's multiple comparison test was used. **=0.01<p<0.001, ****=p<0.0001.

[0053] FIGS. 33A-33D show the efficacy of COH04S1 and Omicron BA.1- and Beta-modified vaccines in protecting hamsters from upper respiratory tract infection following challenge with Omicron BA.1 or BA.2.12.1. SARS-CoV-2 gRNA (FIGS. 33A-33B) and sgRNA (FIGS. 33C-33D) copies were quantified by qPCR in nasal turbinates of COH04S1, COH04S529, and COH04S351 vaccine and control groups at days 4 and 8 following challenge with Omicron subvariants BA.1 (FIGS. 33A, 33C) and BA.2.12.1 (FIGS. 33B, 33D). Lines indicate median RNA copies. One-way ANOVA followed by Tukey's multiple comparison test was used. 0.01<*p<0.05.

[0054] FIGS. 34A-34F show that COH04S1 and Omicron BA.1- and Beta-modified vaccines protect hamsters from lung pathology following challenge with Omicron BA.1 or BA.2.12.1. Hematoxylin/eosin-stained lung sections of COH04S1-, COH04S529-, and COH04S351-vaccinated hamsters and control animals at days 4 and 8 following challenge with SARS-CoV-2 BA.1 (FIGS. 34A-34C) or BA.2.12.1 (FIGS. 34D-34F) variants were evaluated by a board-certified pathologist, and microscopic findings were graded based on severity on a scale from 1 to 5 (Table 5). Cumulative pathology score of all histopathologic findings (FIGS. 34A, 34D), grading of bronchioalveolar hyperplasia disease severity (FIGS. 34B, 34E), and severity of lung inflammatory microscopic findings (FIGS. 34C, 34F) are shown. Lines indicate median values. Two-way ANOVA followed by Tukey's multiple comparison test was used. *=0.05<p<0.01, **=0.01<p<0.001, ***=0.001<p<0.0001, ****=p<0.0001.

[0055] FIGS. 35A-35B show histopathological findings in lungs of COH04S1-, COH04S529-, and COH04S351-vaccinated hamsters following virus challenge with Omicron BA.1 and BA.2.12.1. Shown are representative images (1.25× and 10× magnification) of histopathological findings in hematoxylin/eosin-stained lung sections of COH04S1-, COH04S529-, and COH04S351-vaccinated hamsters and sMVA or unvaccinated control animals at day 8 post-challenge with SARS-CoV-2 BA.1 (FIG. 35A) or BA.2.12.1 (FIG. 35B) variants. Control animals show extensive areas with deeply basophilic and concentrated findings affecting the majority of the lung. Darker areas in COH04S351- and COH04S529-vaccinated animals (FIG. 35A) are considered insufficiently inflated lungs and not SARS-CoV-2-related. Open airways were observed in COH04S1-, COH04S529-, and COH04S351-vaccinated hamsters. Scale bar=800 μm for 1.25× images. Scale bar=100 μm for 10× images.

[0056] FIGS. 36A-36C show sMVA construction. FIG. 36A is a schematic of an MVA genome. The MVA genome is about 178 kbp in length and contains about 9.6 kbp inverted terminal repeat (ITR) sequences. FIG. 36B shows the three sMVA fragments, F1, F2, and F3. The three subgenomic sMVA fragments (F1-F3) comprise about 60 kbp of the left, central, and right parts of the MVA genome as indicated. sMVA F1/F2 and F2/F3 share about 3 kbp overlapping homologous sequences for recombination (dotted crossed lines). Approximate genome positions of commonly used MVA insertion (Del2, IGR69/70, Del3) are indicated. FIG. 36C shows terminal concatemer resolution-hairpin loop-concatemer resolution (CR/HL/CR) sequences. Each of the sMVA fragments contains at both ends a sequence composition comprising a duplex copy of the MVA terminal HL flanked by CR sequences. BAC=bacterial artificial chromosome vector.

[0057] FIG. 37 shows the DNA sequence of an sMVA backbone with possible locations of insertion sites Del2, IGR69/70, and Del3, according to some embodiments.

[0058] FIG. 38 shows the DNA sequence of an F1 nucleotide fragment that includes a portion of the full MVA backbone sequence flanked by an MVA CR/HL/CR sequence with insertion sites, according to some embodiments.

[0059] FIG. 39 shows the DNA sequence of an F2 nucleotide fragment that includes a portion of the full MVA backbone sequence flanked by an MVA CR/HL/CR sequence with insertion sites, according to some embodiments.

[0060] FIG. 40 shows the DNA sequence of an F3 nucleotide fragment that includes a portion of the full MVA backbone sequence flanked by an MVA CR/HL/CR sequence with insertion sites, according to some embodiments.

### DETAILED DESCRIPTION

Vaccines and/or Immunogenic Compositions

[0061] In some aspects, provided are vaccines and/or immunogenic compositions and the use thereof in preventing a coronavirus infection, or preventing, treating, or reducing the severity of COVID-19 caused by the coronavirus infection in a subject, including, for example, a multi-antigenic sMVA-CoV-2 vaccine using the highly versatile synthetic vaccine platform based on a synthetic modified vaccinia Ankara (sMVA) backbone. MVA is a highly attenuated poxvirus vector and is widely used to develop vaccines for infectious diseases and cancer. There is a long history of safety, efficacy, and long-term protection in humans. Nucleic acid sequences encoding one or more antigens or epitopes of interest, such as the spike (S) protein and/or the nucleocapsid (N) protein of SARS-CoV-2 or fragments thereof, can be cloned into the sMVA backbone to form an sMVA vaccine. In some embodiments, the composition comprises a recombinant sMVA vector comprising, expressing, or capable of expressing one or more heterologous DNA sequences encoding the S protein and the N protein. The sMVA vectors used in accordance with the embodiments disclosed herein include a synthetic MVA genome that serves as a viral backbone (referred to herein as the sMVA backbone or sMVA genome backbone) and one or more heterologous nucleotide sequences that encode (i) a SARS-CoV-2 S protein (or variant, mutant, and/or immunogenic fragment thereof) and (ii) a SARS-CoV-2 N protein (or variant, mutant, and/or immunogenic fragment thereof). The terms “S protein” and “S antigen” are used interchangeably herein, and the terms “N protein” and “N antigen” are used interchangeably herein.

[0062] MVA is derived from its parental strain, chorioallantois vaccinia Ankara (CVA), by 570 passages on chicken embryo fibroblasts (CEF). As a result of the attenuation process, MVA has acquired six major genome deletions (Del1-6) as well as multiple shorter deletions, insertions, and point mutations, leading to gene fragmentation, truncation, short internal deletions, and amino acid substitutions. MVA has severely restricted host cell tropism, allowing productive assembly only in avian cells, e.g., CEF and baby hamster kidney (BHK) cells, whereas in human and most other mammalian cells, MVA assembly is abortive due to a late block in virus assembly. Although non-pathogenic and highly attenuated, MVA maintains excellent immunogenicity as demonstrated in various animal models and humans. In the late phase of the smallpox eradication campaign, MVA was used as a priming vector for the replication-competent vaccinia-based vaccine in over 120,000 individuals in Germany and no adverse events were reported. In the past decades, MVA has been developed as a stand-alone smallpox vaccine and is currently pursued by the United States government as a safer alternative to replace the existing vaccinia-based vaccine stocks as a preventative countermeasure in case of a smallpox outbreak. The U.S. Food and Drug Administration (FDA) approved MVA, under the trade name Jynneos (Bavarian Nordic) on Sep. 24, 2019, to prevent both smallpox and monkeypox. Previously, a similar MVA vaccine using the trade name Imvamune was approved in Europe as a smallpox vaccine. Almost all organizations that we are aware of which currently use MVA vectors or derivatives thereof are licensed or owned by academic, commercial, or governmental entities, which greatly restricts their use to commercially develop MVA-based vaccine vectors. A fully synthetic version of MVA from circularized or linear synthetic DNA fragments is produced and disclosed in PCT application No. PCT/US21/16247, the content of which is incorporated by reference in its entirety. The sMVA or the recombinant sMVA can be used as a vaccine for preventing and treating various conditions such as coronavirus infections and associated diseases.

[0063] In some embodiments, the sMVA backbone includes an internal unique region (UR) of a parental MVA genome flanked on each side by at least a portion of an inverted terminal repeat (ITR) region of the parental MVA genome (FIG. 36A). The parental genome used to generate the sMVA backbone may be any known MVA strain or variant thereof including, but not limited to, MVA strain Acambis (Accession #AY603355) or MVA strain Antoine (NCBI Accession #U94848). In some embodiments, the sMVA backbone is identical to the corresponding full-length parental MVA genome sequence. In other embodiments, the sMVA backbone is identical or substantially identical to the corresponding full-length parental MVA genome sequence, but includes one or more unintentional mutations originating from chemical synthesis, cloning, propagation, or other errors resulting from the production of the synthetically made virus. For example, in some embodiments, the sMVA backbone has a single T to A nucleotide alteration located in the IGR at three base pairs downstream of open reading frame (ORF) 021 L. In some embodiments, the sMVA backbone has at least 90% sequence identity, at least 91% sequence identity, at least 92% sequence identity, at least 93% sequence identity, at least 94% sequence identity, at least 95% sequence identity, at least 96% sequence identity, at least 97% sequence identity, at least 98% sequence identity, or at least 99% sequence identity to the corresponding full-length parental MVA genome sequence.

[0064] In some embodiments, heterologous nucleotide sequences that encode one or more SARS-CoV-2 proteins (or variants, mutants, and/or immunogenic fragments thereof) are inserted into one or more MVA insertion sites. Non-limiting examples of insertion sites that may be used to insert the heterologous nucleotide sequences include, but are not limited to, Del2, IGR44/45, IGR64/65, IGR69/70, and Del3. For example, FIG. 37 shows a sequence of an sMVA backbone (SEQ ID NO: 1), as well as the possible insertion sites including Del2 (shown as [[<DEL2INSERT]], where “<<” indicates the heterologous nucleotide insert at Del2 is the reverse complement of the SARS-CoV-2 protein sequence (or variants, mutants, and/or immunogenic fragments thereof) sequence); IGR69/70 (shown as [[<INSERTIGR69/70]A], [[<INSERTIGR69/70]B], [[<<NSERTIGR69/70]c], or [[INSERTIGR69/70]D], where “<<” indicates the heterologous nucleotide insert at IGR69/70 is the reverse complement of the SARS-CoV-2 protein sequence (or variants, mutants, and/or immunogenic fragments thereof), and each insertion site is representative of four alternative insertion sites for IGR69/70: A, B, C, or D); and Del3 (shown as [[DEL3INSERT>>]], where “>>” indicates the heterologous nucleotide insert at Del3 is the forward SARS-CoV-2 protein (or variant, mutant, and/or immunogenic fragment thereof) sequence). FIG. 37 also includes an “X” (highlighted and in bold underline) that may be a T or an A according to some embodiments.

[0065] In some embodiments, the sMVA vector that is used in the compositions disclosed herein is generated according to the methods disclosed in International Application Publication No. WO 2021/236550, which is hereby incorporated by reference as if fully disclosed herein and as indicated in the working examples below. In certain of these embodiments, three nucleotide fragments, F1, F2, and F3, are synthesized, each fragment including a portion of the full MVA backbone sequence flanked by an MVA concatemer resolution-hairpin loop-concatemer resolution (CR/HL/CR) sequence (FIGS. 36B-36C). F1 encompasses the left ITR and ˜50 kbp of the left end of the internal UR of the MVA genome; F2 contains ˜60 kbp of the middle part of the internal UR of the MVA genome; and F3 encompasses ˜50 kbp of the right end of the internal UR and the right ITR of the MVA genome. sMVA F1 and F2 as well as sMVA F2 and F3 are designed to share ˜3 kbp overlapping sequences to allow the reconstitution of the complete MVA genome by homologous recombination (FIG. 36B). A duplex copy of the 165-nucleotide-long MVA terminal hairpin loop (HL) flanked by MVA CR sequences is added to both ends of each of the three fragments to promote MVA genome resolution and packaging (FIG. 36C). The three sMVA fragments are cloned and maintained in E. coli(DH10B, EPI300, GS1783) by a yeast-bacterial shuttle vector, termed pCCI-Brick (GeneScript), which contains a bacterial mini-F replicon element that can be used as a bacterial artificial chromosome (BAC) vector to stably propagate the three fragments at a low copy number in bacteria. Next-generation sequencing analysis confirmed the integrity of the MVA genomic sequences of the fragments, with the notable exception of an unknown single-point mutation within sMVA fragment F1 located in a non-coding determining region at 3 bp downstream of 021 L. FIGS. 38-40 (SEQ ID NOs: 2-4) show sequences of F1, F2, and F3, respectively, according to some embodiments. The CR/HL/CR sequences are underlined. The Del2, IGR69/70, and Del3 insertion sites are also indicated in FIGS. 38-40.

[0066] In some embodiments, the vaccines and/or other immunogenic compositions comprise a single DNA fragment comprising the entire genome sequence of MVA. The single DNA fragment can be used to transfect a host cell such that the MVA is reconstituted. In other embodiments, the vaccines and/or other immunogenic compositions comprise two or more DNA fragments each comprising a partial sequence of the genome of the MVA and having overlapping sequences at the ends of two adjacent DNA fragments, such that the two or more DNA fragments, when transferred into a host cell, are assembled sequentially and comprise the full-length sequence of the MVA genome. The overlapping sequence may be between about 100 bp and about 5000 bp in length. In certain of these embodiments, the two or more DNA fragments correspond to the F1, F2, and F3 fragments as described. In either of these embodiments, the one or more heterologous nucleotide sequences that encode (i) a SARS-CoV-2 S protein (or variant, mutant, and/or immunogenic fragment thereof) and (ii) a SARS-CoV-2 N protein (or variant, mutant, and/or immunogenic fragment thereof) can be inserted into the insertion sites as described (e.g., Del2, IGR69/70, and Del3). In the embodiments where two or more DNA fragments are used, each fragment may serve to carry a separate SARS-CoV-2 protein sequence (or variant, mutant, and/or immunogenic fragment thereof).

[0067] In some embodiments, the vaccines and/or immunogenic compositions comprise a mixture of two or more sMVA vectors which encode two or more different SARS-CoV-2 antigen sequences selected from the Wuhan-Hu-1 reference strain and different VOC. For example, one sMVA vector in the mixture comprises sequences encoding SARS-CoV-2 antigens from the Wuhan-Hu-1 reference strain, and another sMVA vector in the mixture comprises sequences encoding SARS-CoV-2 antigens from a VOC. For another example, one sMVA vector in the mixture comprises sequences encoding SARS-CoV-2 antigens from one VOC, and another sMVA vector in the mixture comprises sequences encoding SARS-CoV-2 antigens from a different VOC.

[0068] In some embodiments, the vaccines and/or immunogenic compositions comprise an sMVA vector which encodes two or more different SARS-CoV-2 antigen sequences selected from the Wuhan-Hu-1 reference strain and different VOC. For example, the sMVA vector comprises a sequence encoding a SARS-CoV-2 antigen (e.g., S protein) from the Wuhan-Hu-1 reference strain, and the same sMVA vector further comprises a sequence encoding a different SARS-CoV-2 antigen (e.g., N protein) from a VOC. For another example, the sMVA vector comprises a sequence encoding a SARS-CoV-2 antigen (e.g., S protein) from one VOC, and the same sMVA vector further comprises a sequence encoding another SARS-CoV-2 antigen (e.g., N protein) from a different VOC.

[0069] In some embodiments, a nucleotide sequence that encodes a SARS-CoV-2 S protein (or variant, mutant, and/or immunogenic fragment thereof) is inserted into the Del2 site within F1, the IGR69/70 site within F2, or the Del3 site within F3.

[0070] In some embodiments, a nucleotide sequence that encodes a SARS-CoV-2 N protein (or variant, mutant, and/or immunogenic fragment thereof) is inserted into the Del2 site within F1, and a nucleotide sequence that encodes a SARS-CoV-2 S protein (or variant, mutant, and/or immunogenic fragment thereof) is inserted into the Del3 site within F3.

[0071] In some embodiments, a nucleotide sequence that encodes a SARS-CoV-2 S protein (or variant, mutant, and/or immunogenic fragment thereof) is inserted into the Del2 site within F1, and a nucleotide sequence that encodes a SARS-CoV-2 N protein (or variant, mutant, and/or immunogenic fragment thereof) is inserted into the Del3 site within F3.

[0072] In some embodiments, a nucleotide sequence that encodes a SARS-CoV-2 S protein (or variant, mutant, and/or immunogenic fragment thereof) is inserted into the IGR69/70 site within F2, and a nucleotide sequence that encodes a SARS-CoV-2 N protein (or variant, mutant, and/or immunogenic fragment thereof) is inserted into the Del3 site within F3.

[0073] In some embodiments, a nucleotide sequence that encodes a SARS-CoV-2 N protein (or variant, mutant, and/or immunogenic fragment thereof) is inserted into the IGR69/70 site within F2, and a nucleotide sequence that encodes a SARS-CoV-2 S protein (or variant, mutant, and/or immunogenic fragment thereof) is inserted into the Del3 site within F3.

[0074] In some embodiments, a nucleotide sequence that encodes a SARS-CoV-2 S protein (or variant, mutant, and/or immunogenic fragment thereof) is inserted into the Del2 site within F1, and a nucleotide sequence that encodes a SARS-CoV-2 N protein (or variant, mutant, and/or immunogenic fragment thereof) is inserted into the IGR69/70 site within F2.

[0075] In some embodiments, a nucleotide sequence that encodes a SARS-CoV-2 N protein (or variant, mutant, and/or immunogenic fragment thereof) is inserted into the Del2 site within F1, and a nucleotide sequence that encodes a SARS-CoV-2 S protein (or variant, mutant, and/or immunogenic fragment thereof) is inserted into the IGR69/70 site within F2.

[0076] In some embodiments, the SARS-CoV-2 S protein (or variant, mutant, and/or immunogenic fragment thereof) and/or the SARS-CoV-2 N protein (or variant, mutant, and/or immunogenic fragment thereof) that are inserted into the F1, F2, and/or F3 fragments as discussed herein are encoded by any SARS-CoV-2 S or N protein, including a reference sequence or any variant or mutants thereof. Exemplary SARS-CoV-2 S or N proteins that are encoded by the heterologous sequences that can be inserted into the F1, F2, and/or F3 fragments as discussed herein (and thus incorporated into the sMVA vector and reconstituted sMVA virus) are found in International Application Publication No. WO 2021/236550, which is hereby incorporated by reference as if fully disclosed herein, as well as additional sequences and mutations discussed below.

[0077] In some embodiments, the vaccines and/or immunogenic compositions comprise one or more sMVA vectors, wherein the one or more sMVA vectors comprise one or more heterologous DNA sequences encoding the S protein and/or N protein of the SARS-CoV-2 Wuhan-Hu-1 reference strain. In some embodiments, the one or more sMVA vectors comprise one or more heterologous DNA sequences encoding a mutant S protein and/or N protein such as a mutant S protein and/or N protein based on a VOC, including B.1.1.7 (Alpha), B.1.351 (Beta), P.1 (Gamma), B.1.617.2 (Delta), B.1.621 (Mu), C.37 (Lambda), C.1.2, BA.1 (Omicron), BA.2 (Omicron), BA.2.12.1 (Omicron), BA.4 (Omicron), BA.5 (Omicron), BA.2.75 (Omicron), BQ.1 (Omicron), BQ.1.1 (Omicron), and XBB (Omicron). Exemplary sequences of the variants of the S proteins and N proteins are summarized in Table 1. According to some embodiments, the sMVA vectors are reconstituted sMVA viruses that express or are capable of expressing the one or more S proteins and/or N proteins (or mutants thereof) disclosed herein. In certain of these embodiments, the DNA sequences encoding the S and/or N protein can be codon optimized or comprise silent codon alterations to avoid consecutive nucleotides of the same kind.

TABLE 1
Exemplary sequences of SARS-COV-2 S and N proteins

| SEQ ID | | |
|---|---|---|
| NO: | Sequences | Descriptions |
| 5 | atgtttgtctttcttgtcttattgccactagtctctagtcagtgtgttaatcttacaaccag | Nucleotide |
| | aactcaattaccacctgcatacactaattctttcacacgtggtgtttattaccctgac | sequence/ORF |
| | aaagtattcagatcctcagtattacattcaactcaggacttgttcttacctttcttctcc | (5′ to 3′ end) of |
| | aatgttacttggttccatgctatacatgtctctgggaccaatggtactaagaggtttg | the SARS-CoV- |
| | ataaccctgtcctaccatttaatgatggtgtttatttcgcttccactgagaagtctaac | 2 S antigen |
| | ataataagaggctggatatttggtactactttagattcgaagacccagtccctactt | sequence based |
| | attgttaataacgctactaatgttgttattaaagtctgtgaatttcaattctgtaatgatc | on the Wuhan- |
| | cattcttgggtgtttattaccacaagaacaacaagagttggatggaaagtgagttc | Hu-1 reference |
| | agagtttattctagtgcgaataattgcactttcgaatatgtctctcagcctttccttatg | strain |
| | gaccttgaaggtaaacagggtaatttcaagaatcttagggaatttgtgtttaagaat | (#NC_045512) |
| | attgatggttatttcaagatatattctaagcacacgcctattaatttagtgcgtgatctc | and optimized |
| | cctcagggtttctcggctttagaaccattggtagatttgccaataggtattaacatca | for stability in |
| | ctaggtttcaaactttacttgctttacatagaagttatttgactcctggtgattcttcttca | vaccinia by |
| | ggttggacagctggtgctgcagcttattatgtgggttatcttcaacctaggactttcct | silent codon |
| | attgaaatataatgagaatggaaccattacagatgctgtagactgtgcacttgacc | alteration to |
| | ctctctcagaaacaaagtgtacgttgaaatccttcactgtagagaaaggaatctat | avoid 4 or more |
| | caaacttctaactttagagtccaaccaacagaatctattgttagatttcctaatatta | of the same |
| | caaacttgtgccctttcggtgaagtatttaacgccaccagatttgcatctgtttatgctt | nucleotides in |
| | ggaacaggaagagaatcagcaactgtgttgctgattattctgtcctatataattccg | consecutive |
| | catcattctccacatttaagtgttatggagtgtctcctactaaattaaatgatctctgct | order |
| | ttactaatgtctatgcagattcatttgtaattagaggtgatgaagtcagacaaatcg | |
| | ctccagggcaaactggaaagattgctgattataattataaattaccagatgacttta | |
| | caggctgcgttatagcttggaattctaacaatcttgattctaaggttggtggtaattat | |
| | aattacctgtatagattgtttaggaagtctaatctcaaacctttcgagagagatatttc | |
| | aactgaaatctatcaggccggtagcacaccttgtaatggtgttgaaggatttaattg | |
| | ttactttcctttacaatcatatggtttccaacccactaatggtgttggttaccaaccata | |
| | cagagtagtagtactttcatttgaacttctacatgcaccagcaactgtttgtggacct | |
| | aagaagtctactaatttggttaagaacaaatgtgtcaatttcaacttcaatggtttaa | |
| | caggcacaggtgttcttactgagtctaacaagaagtttctgcctttccaacaatttg | |
| | gcagagacattgctgacactactgatgctgtccgtgatccacagacacttgagatt | |
| | cttgacattacaccatgttcatttggtggtgtcagtgttataacaccaggaacaaat | |
| | acttctaaccaggttgctgttctttatcaggatgttaactgcacagaagtccctgttgc | |
| | tattcatgcagatcaacttactcctacttggcgtgtttattctacaggttctaatgtattt | |
| | caaacacgtgcaggctgtttaataggagctgaacatgtcaacaactcatatgagt | |
| | gtgacatacccattggtgcaggtatatgcgctagttatcagactcagactaattctc | |
| | ctcggcgggcacgtagtgtagctagtcaatccatcattgcctacactatgtcacttg | |
| | gtgcagagaattcagttgcttactctaataactctattgccatacccacaaactttac | |
| | tattagtgttaccacagaaattctaccagtgtctatgaccaagacatcagtagattg | |
| | tacaatgtacatttgtggtgattcaactgaatgcagcaatctattgttgcaatatggc | |
| | agtttctgtacacaattaaaccgtgctttaactggaatagctgttgaacaagacaa | |
| | gaacacccaagaagtatttgcacaagtcaaacaaatttacaagacaccaccaa | |
| | ttaaagatttcggtggatttaatttctcacaaatattaccagatccatctaaaccaag | |
| | caagaggtcatttattgaagatctactattcaacaaagtgacacttgcagatgctg | |
| | gcttcatcaaacaatatggtgattgccttggtgatattgctgctagagacctcatttgt | |
| | gcacagaagtttaacggccttactgtattgccacctttgctcacagatgaaatgatt | |
| | gctcaatacacttctgcactgttagcgggtacaatcacttctggttggacctttggtg | |
| | caggtgctgcattacaaataccatttgctatgcaaatggcttataggtttaatggtatt | |
| | ggagttacacagaatgttctctatgagaaccagaaattgattgccaaccaatttaa | |
| | tagtgctattggcaagattcaagactcactttcttccacagcaagtgcacttggtaa | |
| | acttcaagatgtggtcaaccagaatgcacaagctttaaacacgcttgttaaacaa | |
| | cttagctccaactttggtgcaatttcaagtgtattaaatgatatcctttcacgtcttgac | |
| | aaagttgaggctgaagtgcaaattgataggttgatcacaggcagacttcaaagtt | |
| | tgcagacatatgtgactcaacaattaattagagctgcagaaatcagagcttctgct | |
| | aatcttgctgctactaagatgtcagagtgtgtacttggacaatctaagagagttgat | |
| | ttctgtggaaagggctatcatcttatgtccttccctcagtcagcacctcatggtgtagt | |
| | cttcttgcatgtgacttatgtccctgcacaagagaagaacttcacaactgctcctgc | |
| | catttgtcatgatggtaaagcacactttcctcgtgaaggtgtctttgtttcaaatggca | |
| | cacactggtttgtaacacaaaggaatttctatgaaccacaaatcattactacaga | |
| | caacacatttgtgtctggtaactgtgatgttgtaataggaattgtcaacaacacagtt | |
| | tatgatcctttgcaacctgaattagactcattcaaggaggagttagataaatatttca | |
| | agaatcatacatcaccagatgttgatttaggtgacatctctggcattaatgcttcagt | |
| | tgtaaacattcagaaagaaattgaccgcctcaatgaggttgccaagaatttaaat | |
| | gaatctctcatcgatctccaagaacttggaaagtatgagcagtatatcaaatggc | |
| | catggtacatttggctaggtttcatagctggcttgattgccatagtaatggtgacaatt | |
| | atgctttgctgtatgaccagttgctgtagttgtctcaagggctgttgttcttgtggatcct | |
| | gctgcaaatttgatgaagacgactctgagccagtgctcaaaggagtcaaattac | |
| | attacacataa | |
| 6 | MFVFLVLLPLVSSQCVNLTTRTQLPPAYTNSFTRGVYYPD | Amino acid |
| | KVFRSSVLHSTQDLFLPFFSNVTWFHAIHVSGTNGTKRF | sequence (N- to |
| | DNPVLPFNDGVYFASTEKSNIIRGWIFGTTLDSKTQSLLIV | C-terminus) of |
| | NNATNVVIKVCEFQFCNDPFLGVYYHKNNKSWMESEFR | the SARS-CoV- |
| | VYSSANNCTFEYVSQPFLMDLEGKQGNFKNLREFVFKNI | 2 S antigen |
| | DGYFKIYSKHTPINLVRDLPQGFSALEPLVDLPIGINITRFQ | sequence based |
| | TLLALHRSYLTPGDSSSGWTAGAAAYYVGYLQPRTFLLK | on the Wuhan- |
| | YNENGTITDAVDCALDPLSETKCTLKSFTVEKGIYQTSNF | Hu-1 reference |
| | RVQPTESIVRFPNITNLCPFGEVFNATRFASVYAWNRKRI | strain |
| | SNCVADYSVLYNSASFSTFKCYGVSPTKLNDLCFTNVYA | (#NC_045512) |
| | DSFVIRGDEVRQIAPGQTGKIADYNYKLPDDFTGCVIAWN | |
| | SNNLDSKVGGNYNYLYRLFRKSNLKPFERDISTEIYQAGS | |
| | TPCNGVEGFNCYFPLQSYGFQPTNGVGYQPYRVVVLSF | |
| | ELLHAPATVCGPKKSTNLVKNKCVNFNFNGLTGTGVLTE | |
| | SNKKFLPFQQFGRDIADTTDAVRDPQTLEILDITPCSFGG | |
| | VSVITPGTNTSNQVAVLYQDVNCTEVPVAIHADQLTPTW | |
| | RVYSTGSNVFQTRAGCLIGAEHVNNSYECDIPIGAGICAS | |
| | YQTQTNSPRRARSVASQSIIAYTMSLGAENSVAYSNNSIA | |
| | IPTNFTISVTTEILPVSMTKTSVDCTMYICGDSTECSNLLLQ | |
| | YGSFCTQLNRALTGIAVEQDKNTQEVFAQVKQIYKTPPIK | |
| | DFGGFNFSQILPDPSKPSKRSFIEDLLFNKVTLADAGFIKQ | |
| | YGDCLGDIAARDLICAQKFNGLTVLPPLLTDEMIAQYTSAL | |
| | LAGTITSGWTFGAGAALQIPFAMQMAYRFNGIGVTQNVL | |
| | YENQKLIANQFNSAIGKIQDSLSSTASALGKLQDVVNQNA | |
| | QALNTLVKQLSSNFGAISSVLNDILSRLDKVEAEVQIDRLIT | |
| | GRLQSLQTYVTQQLIRAAEIRASANLAATKMSECVLGQSK | |
| | RVDFCGKGYHLMSFPQSAPHGVVFLHVTYVPAQEKNFT | |
| | TAPAICHDGKAHFPREGVFVSNGTHWFVTQRNFYEPQIIT | |
| | TDNTFVSGNCDVVIGIVNNTVYDPLQPELDSFKEELDKYF | |
| | KNHTSPDVDLGDISGINASVVNIQKEIDRLNEVAKNLNESL | |
| | IDLQELGKYEQYIKWPWYIWLGFIAGLIAIVMVTIMLCCMT | |
| | SCCSCLKGCCSCGSCCKFDEDDSEPVLKGVKLHYT | |
| 7 | atgtctgataacggaccacagaatcagcgaaacgcaccacgcattacgtttggt | Nucleotide |
| | ggaccctcagattcaactggcagtaaccagaatggagaacgcagtggagcgc | sequence/ORF |
| | gatctaaacaacgtcggcctcaaggtttacccaataatactgcgtcttggttcacc | (5′ to 3′ end) of |
| | gctctcactcaacatggcaaggaagaccttaaattccctcgaggacaaggcgtt | the SARS-CoV- |
| | ccaattaacaccaatagcagtccagatgaccaaattggctactaccgaagagct | 2 N antigen |
| | accagacgaattcgtggtggtgacggtaagatgaaagatctcagtccaagatgg | sequence based |
| | tatttctactacctaggaactgggccagaagctggacttccctatggtgctaacaa | on the Wuhan- |
| | agacggcatcatatgggttgcaactgagggagccttgaatacacctaaagatca | Hu-1 reference |
| | cattggcacccgcaatcctgctaacaatgctgcaatcgtgctacaacttcctcaag | strain |
| | gaacaacattgcctaaaggcttctacgcagaagggagcagaggcggcagtca | (#NC_045512) |
| | agcctcttctcgttcctcatcacgtagtcgcaacagttcaagaaattcaactccag | and optimized |
| | gcagcagtagaggaacttctcctgctagaatggctggcaatggcggtgatgctg | for stability in |
| | ctcttgctttgctgctgcttgacagattgaaccagcttgagagcaagatgtctggta | vaccinia by |
| | aaggccaacaacaacaaggccaaactgtcactaagaaatctgctgctgaggct | silent codon |
| | tctaagaagcctcggcagaaacgtactgccactaaagcatacaatgtaacaca | alteration to |
| | agctttcggcagacgtggtccagaacaaacccaaggaaactttggagaccag | avoid 4 or more |
| | gaactaatcagacaaggaactgattacaaacattggccgcaaattgcacaattt | of the same |
| | gctcccagcgcttcagcgttcttcggaatgtcgcgcattggcatggaagtcacac | nucleotides in |
| | cttcgggaacgtggttgacctacacaggtgccatcaaattggatgacaaagatc | consecutive |
| | caaatttcaaagatcaagtcatattgctgaataagcatattgacgcatacaagac | order |
| | attcccaccaacagagcctaagaaggacaagaagaagaaggctgatgaaac | |
| | tcaagccttaccgcagagacagaagaaacagcaaactgtgactcttcttcctgct | |
| | gcagatttggatgatttctccaaacaattgcaacaatccatgagcagtgctgactc | |
| | aactcaggcctaa | |
| 8 | MSDNGPQNQRNAPRITFGGPSDSTGSNQNGERSGARS | Amino acid |
| | KQRRPQGLPNNTASWFTALTQHGKEDLKFPRGQGVPIN | sequence (N- to |
| | TNSSPDDQIGYYRRATRRIRGGDGKMKDLSPRWYFYYL | C-terminus) of |
| | GTGPEAGLPYGANKDGIIWVATEGALNTPKDHIGTRNPA | the SARS-CoV- |
| | NNAAIVLQLPQGTTLPKGFYAEGSRGGSQASSRSSSRSR | 2 N antigen |
| | NSSRNSTPGSSRGTSPARMAGNGGDAALALLLLDRLNQ | sequence based |
| | LESKMSGKGQQQQGQTVTKKSAAEASKKPRQKRTATKA | on the Wuhan- |
| | YNVTQAFGRRGPEQTQGNFGDQELIRQGTDYKHWPQIA | Hu-1 reference |
| | QFAPSASAFFGMSRIGMEVTPSGTWLTYTGAIKLDDKDP | strain |
| | NFKDQVILLNKHIDAYKTFPPTEPKKDKKKKADETQALPQ | (#NC_045512) |
| | RQKKQQTVTLLPAADLDDFSKQLQQSMSSADSTQA | |
| 9 | atgtttgtctttcttgtcttattgccactagtctctagtcagtgtgttaatcttagaaccag | Nucleotide |
| | aactcaattaccacctgcatacactaattctttcacacgtggtgtttattaccctgac | sequence/ORF |
| | aaagtattcagatcctcagtattacattcaactcaggacttgttcttacctttcttctcc | (5′ to 3′ end) of |
| | aatgttacttggttccatgctatacatgtctctgggaccaatggtactaagaggtttg | a codon- |
| | ataaccctgtcctaccatttaatgatggtgtttatttcgcttccactgagaagtctaac | optimized |
| | ataataagaggctggatatttggtactactttagattcgaagacccagtccctactt | SARS-CoV-2 S |
| | attgttaataacgctactaatgttgttattaaagtctgtgaatttcaattctgtaatgatc | antigen |
| | cattcttggatgtttattaccacaagaacaacaagagttggatggaaagtggagtt | sequence based |
| | tattctagtgcgaataattgcactttcgaatatgtctctcagcctttccttatggaccttg | on the Wuhan- |
| | aaggtaaacagggtaatttcaagaatcttagggaatttgtgtttaagaatattgatg | Hu-1 reference |
| | gttatttcaagatatattctaagcacacgcctattaatttagtgcgtgatctccctcag | strain |
| | ggtttctcggctttagaaccattggtagatttgccaataggtattaacatcactaggtt | (#NC_045512) |
| | tcaaactttacttgctttacatagaagttatttgactcctggtgattcttcttcaggttgg | and optimized |
| | acagctggtgctgcagcttattatgtgggttatcttcaacctaggactttcctattgaa | for vaccinia, |
| | atataatgagaatggaaccattacagatgctgtagactgtgcacttgaccctctct | which is further |
| | cagaaacaaagtgtacgttgaaatccttcactgtagagaaaggaatctatcaaa | modified to |
| | cttctaactttagagtccaaccaacagaatctattgttagatttcctaatattacaaa | encode for an S |
| | cttgtgccctttcggtgaagtatttaacgccaccagatttgcatctgtttatgcttgga | antigen that |
| | acaggaagagaatcagcaactgtgttgctgattattctgtcctatataattccgcat | includes |
| | cattctccacatttaagtgttatggagtgtctcctactaaattaaatgatctctgcttta | mutations of the |
| | ctaatgtctatgcagattcatttgtaattagaggtgatgaagtcagacaaatcgctc | B.1.617.2 |
| | cagggcaaactggaaagattgctgattataattataaattaccagatgactttaca | variant lineage |
| | ggctgcgttatagcttggaattctaacaatcttgattctaaggttggtggtaattataa | identified in |
| | ttaccggtatagattgtttaggaagtctaatctcaaacctttcgagagagatatttca | India, including |
| | actgaaatctatcaggccggtagcaaaccttgtaatggtgttgaaggatttaattgt | T19R, G142D, |
| | tactttcctttacaatcatatggtttccaacccactaatggtgttggttaccaaccata | Del156/157, |
| | cagagtagtagtactttcatttgaacttctacatgcaccagcaactgtttgtggacct | R158G, L452R, |
| | aagaagtctactaatttggttaagaacaaatgtgtcaatttcaacttcaatggtttaa | T478K, D614G, |
| | caggcacaggtgttcttactgagtctaacaagaagtttctgcctttccaacaatttg | P681R, and |
| | gcagagacattgctgacactactgatgctgtccgtgatccacagacacttgagatt | D950N |
| | cttgacattacaccatgttcatttggtggtgtcagtgttataacaccaggaacaaat | |
| | acttctaaccaggttgctgttctttatcagggtgttaactgcacagaagtccctgttgc | |
| | tattcatgcagatcaacttactcctacttggcgtgtttattctacaggttctaatgtattt | |
| | caaacacgtgcaggctgtttaataggagctgaacatgtcaacaactcatatgagt | |
| | gtgacatacccattggtgcaggtatatgcgctagttatcagactcagactaattctc | |
| | gtcggcgggcacgtagtgtagctagtcaatccatcattgcctacactatgtcacttg | |
| | gtgcagagaattcagttgcttactctaataactctattgccatacccacaaactttac | |
| | tattagtgttaccacagaaattctaccagtgtctatgaccaagacatcagtagattg | |
| | tacaatgtacatttgtggtgattcaactgaatgcagcaatctattgttgcaatatggc | |
| | agtttctgtacacaattaaaccgtgctttaactggaatagctgttgaacaagacaa | |
| | gaacacccaagaagtatttgcacaagtcaaacaaatttacaagacaccaccaa | |
| | ttaaagatttcggtggatttaatttctcacaaatattaccagatccatctaaaccaag | |
| | caagaggtcatttattgaagatctactattcaacaaagtgacacttgcagatgctg | |
| | gcttcatcaaacaatatggtgattgccttggtgatattgctgctagagacctcatttgt | |
| | gcacagaagtttaacggccttactgtattgccacctttgctcacagatgaaatgatt | |
| | gctcaatacacttctgcactgttagcgggtacaatcacttctggttggacctttggtg | |
| | caggtgctgcattacaaataccatttgctatgcaaatggcttataggtttaatggtatt | |
| | ggagttacacagaatgttctctatgagaaccagaaattgattgccaaccaatttaa | |
| | tagtgctattggcaagattcaagactcactttcttccacagcaagtgcacttggtaa | |
| | acttcagaatgtggtcaaccagaatgcacaagctttaaacacgcttgttaaacaa | |
| | cttagctccaactttggtgcaatttcaagtgtattaaatgatatcctttcacgtcttgac | |
| | aaagttgaggctgaagtgcaaattgataggttgatcacaggcagacttcaaagtt | |
| | tgcagacatatgtgactcaacaattaattagagctgcagaaatcagagcttctgct | |
| | aatcttgctgctactaagatgtcagagtgtgtacttggacaatctaagagagttgat | |
| | ttctgtggaaagggctatcatcttatgtccttccctcagtcagcacctcatggtgtagt | |
| | cttcttgcatgtgacttatgtccctgcacaagagaagaacttcacaactgctcctgc | |
| | catttgtcatgatggtaaagcacactttcctcgtgaaggtgtctttgtttcaaatggca | |
| | cacactggtttgtaacacaaaggaatttctatgaaccacaaatcattactacaga | |
| | caacacatttgtgtctggtaactgtgatgttgtaataggaattgtcaacaacacagtt | |
| | tatgatcctttgcaacctgaattagactcattcaaggaggagttagataaatatttca | |
| | agaatcatacatcaccagatgttgatttaggtgacatctctggcattaatgcttcagt | |
| | tgtaaacattcagaaagaaattgaccgcctcaatgaggttgccaagaatttaaat | |
| | gaatctctcatcgatctccaagaacttggaaagtatgagcagtatatcaaatggc | |
| | catggtacatttggctaggtttcatagctggcttgattgccatagtaatggtgacaatt | |
| | atgctttgctgtatgaccagttgctgtagttgtctcaagggctgttgttcttgtggatcct | |
| | gctgcaaatttgatgaagacgactctgagccagtgctcaaaggagtcaaattac | |
| | attacacataa | |
| 10 | MFVFLVLLPLVSSQCVNLRTRTQLPPAYTNSFTRGVYYP | Amino acid |
| | DKVFRSSVLHSTQDLFLPFFSNVTWFHAIHVSGTNGTKR | sequence (N- to |
| | FDNPVLPFNDGVYFASTEKSNIIRGWIFGTTLDSKTQSLLI | C-terminus) of a |
| | VNNATNVVIKVCEFQFCNDPFLDVYYHKNNKSWMESGV | codon-optimized |
| | YSSANNCTFEYVSQPFLMDLEGKQGNFKNLREFVFKNID | SARS-CoV-2 S |
| | GYFKIYSKHTPINLVRDLPQGFSALEPLVDLPIGINITRFQT | antigen |
| | LLALHRSYLTPGDSSSGWTAGAAAYYVGYLQPRTFLLKY | sequence based |
| | NENGTITDAVDCALDPLSETKCTLKSFTVEKGIYQTSNFR | on the Wuhan- |
| | VQPTESIVRFPNITNLCPFGEVFNATRFASVYAWNRKRIS | Hu-1 reference |
| | NCVADYSVLYNSASFSTFKCYGVSPTKLNDLCFTNVYAD | strain |
| | SFVIRGDEVRQIAPGQTGKIADYNYKLPDDFTGCVIAWNS | (#NC_045512) |
| | NNLDSKVGGNYNYRYRLFRKSNLKPFERDISTEIYQAGSK | and optimized |
| | PCNGVEGFNCYFPLQSYGFQPTNGVGYQPYRVVVLSFE | for vaccinia, |
| | LLHAPATVCGPKKSTNLVKNKCVNFNFNGLTGTGVLTES | which is further |
| | NKKFLPFQQFGRDIADTTDAVRDPQTLEILDITPCSFGGV | modified to |
| | SVITPGTNTSNQVAVLYQGVNCTEVPVAIHADQLTPTWR | encode for an S |
| | VYSTGSNVFQTRAGCLIGAEHVNNSYECDIPIGAGICASY | antigen that |
| | QTQTNSRRRARSVASQSIIAYTMSLGAENSVAYSNNSIAI | includes |
| | PTNFTISVTTEILPVSMTKTSVDCTMYICGDSTECSNLLLQ | mutations of the |
| | YGSFCTQLNRALTGIAVEQDKNTQEVFAQVKQIYKTPPIK | B.1.617.2 |
| | DFGGFNFSQILPDPSKPSKRSFIEDLLFNKVTLADAGFIKQ | variant lineage |
| | YGDCLGDIAARDLICAQKFNGLTVLPPLLTDEMIAQYTSAL | identified in |
| | LAGTITSGWTFGAGAALQIPFAMQMAYRFNGIGVTQNVL | India, including |
| | YENQKLIANQFNSAIGKIQDSLSSTASALGKLQNVVNQNA | T19R, G142D, |
| | QALNTLVKQLSSNFGAISSVLNDILSRLDKVEAEVQIDRLIT | Del156/157, |
| | GRLQSLQTYVTQQLIRAAEIRASANLAATKMSECVLGQSK | R158G, L452R, |
| | RVDFCGKGYHLMSFPQSAPHGVVFLHVTYVPAQEKNFT | T478K, D614G, |
| | TAPAICHDGKAHFPREGVFVSNGTHWFVTQRNFYEPQIIT | P681R, and |
| | TDNTFVSGNCDVVIGIVNNTVYDPLQPELDSFKEELDKYF | D950N |
| | KNHTSPDVDLGDISGINASVVNIQKEIDRLNEVAKNLNESL | |
| | IDLQELGKYEQYIKWPWYIWLGFIAGLIAIVMVTIMLCCMT | |
| | SCCSCLKGCCSCGSCCKFDEDDSEPVLKGVKLHYT | |
| 11 | atgtttgtctttcttgtcttattgccactagtctctagtcagtgtgttaatcttagaaccag | Nucleotide |
| | aactcaattaccacctgcatacactaattctttcacacgtggtgtttattaccctgac | sequence/ORF |
| | aaagtattcagatcctcagtattacattcaactcaggacttgttcttacctttcttctcc | (5′ to 3′ end) of |
| | aatgttacttggttccatgctatacatgtctctgggaccaatggtactaagaggtttg | a codon- |
| | ataaccctgtcctaccatttaatgatggtgtttatttcgcttccactgagaagtctaac | optimized |
| | ataataagaggctggatatttggtactactttagattcgaagacccagtccctactt | SARS-CoV-2 S |
| | attgttaataacgctactaatgttgttattaaagtctgtgaatttcaattctgtaatgatc | antigen |
| | cattcttgggtgtttattaccacaagaacaacaagagttggatggaaagtggtgttt | sequence based |
| | attctagtgcgaataattgcactttcgaatatgtctctcagcctttccttatggaccttg | on the Wuhan- |
| | aaggtaaacagggtaatttcaagaatcttagggaatttgtgtttaagaatattgatg | Hu-1 reference |
| | gttatttcaagatatattctaagcacacgcctattaatttagtgcgtgatctccctcag | strain |
| | ggtttctcggctttagaaccattggtagatttgccaataggtattaacatcactaggtt | (#NC_045512) |
| | tcaaactttacttgctttacatagaagttatttgactcctggtgattctttctcaggttgg | and optimized |
| | acagctggtgctgcagcttattatgtgggttatcttcaacctaggactttcctattgaa | for vaccinia, |
| | atataatgagaatggaaccattacagatgctgtagactgtgcacttgaccctctct | which is further |
| | cagaaacaaagtgtacgttgaaatccttcactgtagagaaaggaatctatcaaa | modified to |
| | cttctaactttagagtccaaccaacagaatctattgttagatttcctaatattacaaa | encode for an S |
| | cttgtgccctttcggtgaagtatttaacgccaccagatttgcatctgtttatgcttgga | antigen that |
| | acaggaagagaatcagcaactgtgttgctgattattctgtcctatataattccgcat | includes |
| | cattctccacatttaagtgttatggagtgtctcctactaaattaaatgatctctgcttta | mutations of the |
| | ctaatgtctatgcagattcatttgtaattagaggtgatgaagtcagacaaatcgctc | B.1.617.2 |
| | cagggcaaactggaaagattgctgattataattataaattaccagatgactttaca | variant lineage |
| | ggctgcgttatagcttggaattctaacaatcttgattctaaggttggtggtaattataa | identified in |
| | ttaccggtatagattgtttaggaagtctaatctcaaacctttcgagagagatatttca | India, including |
| | actgaaatctatcaggccggtagcaaaccttgtaatggtgttgaaggatttaattgt | T19R, E156G, |
| | tactttcctttacaatcatatggtttccaacccactaatggtgttggttaccaaccata | Del157/158, |
| | cagagtagtagtactttcatttgaacttctacatgcaccagcaactgtttgtggacct | S255F, L452R, |
| | aagaagtctactaatttggttaagaacaaatgtgtcaatttcaacttcaatggtttaa | T478K, D614G, |
| | caggcacaggtgttcttactgagtctaacaagaagtttctgcctttccaacaatttg | P681R, and |
| | gcagagacattgctgacactactgatgctgtccgtgatccacagacacttgagatt | D950N |
| | cttgacattacaccatgttcatttggtggtgtcagtgttataacaccaggaacaaat | |
| | acttctaaccaggttgctgttctttatcagggtgttaactgcacagaagtccctgttgc | |
| | tattcatgcagatcaacttactcctacttggcgtgtttattctacaggttctaatgtattt | |
| | caaacacgtgcaggctgtttaataggagctgaacatgtcaacaactcatatgagt | |
| | gtgacatacccattggtgcaggtatatgcgctagttatcagactcagactaattctc | |
| | gtcggcgggcacgtagtgtagctagtcaatccatcattgcctacactatgtcacttg | |
| | gtgcagagaattcagttgcttactctaataactctattgccatacccacaaactttac | |
| | tattagtgttaccacagaaattctaccagtgtctatgaccaagacatcagtagattg | |
| | tacaatgtacatttgtggtgattcaactgaatgcagcaatctattgttgcaatatggc | |
| | agtttctgtacacaattaaaccgtgctttaactggaatagctgttgaacaagacaa | |
| | gaacacccaagaagtatttgcacaagtcaaacaaatttacaagacaccaccaa | |
| | ttaaagatttcggtggatttaatttctcacaaatattaccagatccatctaaaccaag | |
| | caagaggtcatttattgaagatctactattcaacaaagtgacacttgcagatgctg | |
| | gcttcatcaaacaatatggtgattgccttggtgatattgctgctagagacctcatttgt | |
| | gcacagaagtttaacggccttactgtattgccacctttgctcacagatgaaatgatt | |
| | gctcaatacacttctgcactgttagcgggtacaatcacttctggttggacctttggtg | |
| | caggtgctgcattacaaataccatttgctatgcaaatggcttataggtttaatggtatt | |
| | ggagttacacagaatgttctctatgagaaccagaaattgattgccaaccaatttaa | |
| | tagtgctattggcaagattcaagactcactttcttccacagcaagtgcacttggtaa | |
| | acttcagaatgtggtcaaccagaatgcacaagctttaaacacgcttgttaaacaa | |
| | cttagctccaactttggtgcaatttcaagtgtattaaatgatatcctttcacgtcttgac | |
| | aaagttgaggctgaagtgcaaattgataggttgatcacaggcagacttcaaagtt | |
| | tgcagacatatgtgactcaacaattaattagagctgcagaaatcagagcttctgct | |
| | aatcttgctgctactaagatgtcagagtgtgtacttggacaatctaagagagttgat | |
| | ttctgtggaaagggctatcatcttatgtccttccctcagtcagcacctcatggtgtagt | |
| | cttcttgcatgtgacttatgtccctgcacaagagaagaacttcacaactgctcctgc | |
| | catttgtcatgatggtaaagcacactttcctcgtgaaggtgtctttgtttcaaatggca | |
| | cacactggtttgtaacacaaaggaatttctatgaaccacaaatcattactacaga | |
| | caacacatttgtgtctggtaactgtgatgttgtaataggaattgtcaacaacacagtt | |
| | tatgatcctttgcaacctgaattagactcattcaaggaggagttagataaatatttca | |
| | agaatcatacatcaccagatgttgatttaggtgacatctctggcattaatgcttcagt | |
| | tgtaaacattcagaaagaaattgaccgcctcaatgaggttgccaagaatttaaat | |
| | gaatctctcatcgatctccaagaacttggaaagtatgagcagtatatcaaatggc | |
| | catggtacatttggctaggtttcatagctggcttgattgccatagtaatggtgacaatt | |
| | atgctttgctgtatgaccagttgctgtagttgtctcaagggctgttgttcttgtggatcct | |
| | gctgcaaatttgatgaagacgactctgagccagtgctcaaaggagtcaaattac | |
| | attacacataa | |
| 12 | MFVFLVLLPLVSSQCVNLRTRTQLPPAYTNSFTRGVYYP | Amino acid |
| | DKVFRSSVLHSTQDLFLPFFSNVTWFHAIHVSGTNGTKR | sequence (N- to |
| | FDNPVLPFNDGVYFASTEKSNIIRGWIFGTTLDSKTQSLLI | C-terminus) of a |
| | VNNATNVVIKVCEFQFCNDPFLGVYYHKNNKSWMESGV | codon-optimized |
| | YSSANNCTFEYVSQPFLMDLEGKQGNFKNLREFVFKNID | SARS-CoV-2 S |
| | GYFKIYSKHTPINLVRDLPQGFSALEPLVDLPIGINITRFQT | antigen |
| | LLALHRSYLTPGDSFSGWTAGAAAYYVGYLQPRTFLLKY | sequence based |
| | NENGTITDAVDCALDPLSETKCTLKSFTVEKGIYQTSNFR | on the Wuhan- |
| | VQPTESIVRFPNITNLCPFGEVFNATRFASVYAWNRKRIS | Hu-1 reference |
| | NCVADYSVLYNSASFSTFKCYGVSPTKLNDLCFTNVYAD | strain |
| | SFVIRGDEVRQIAPGQTGKIADYNYKLPDDFTGCVIAWNS | (#NC_045512) |
| | NNLDSKVGGNYNYRYRLFRKSNLKPFERDISTEIYQAGSK | and optimized |
| | PCNGVEGFNCYFPLQSYGFQPTNGVGYQPYRVVVLSFE | for vaccinia, |
| | LLHAPATVCGPKKSTNLVKNKCVNFNFNGLTGTGVLTES | which is further |
| | NKKFLPFQQFGRDIADTTDAVRDPQTLEILDITPCSFGGV | modified to |
| | SVITPGTNTSNQVAVLYQGVNCTEVPVAIHADQLTPTWR | encode for an S |
| | VYSTGSNVFQTRAGCLIGAEHVNNSYECDIPIGAGICASY | antigen that |
| | QTQTNSRRRARSVASQSIIAYTMSLGAENSVAYSNNSIAI | includes |
| | PTNFTISVTTEILPVSMTKTSVDCTMYICGDSTECSNLLLQ | mutations of the |
| | YGSFCTQLNRALTGIAVEQDKNTQEVFAQVKQIYKTPPIK | B.1.617.2 |
| | DFGGFNFSQILPDPSKPSKRSFIEDLLFNKVTLADAGFIKQ | variant lineage |
| | YGDCLGDIAARDLICAQKFNGLTVLPPLLTDEMIAQYTSAL | identified in |
| | LAGTITSGWTFGAGAALQIPFAMQMAYRFNGIGVTQNVL | India, including |
| | YENQKLIANQFNSAIGKIQDSLSSTASALGKLQNVVNQNA | T19R, E156G, |
| | QALNTLVKQLSSNFGAISSVLNDILSRLDKVEAEVQIDRLIT | Del157/158, |
| | GRLQSLQTYVTQQLIRAAEIRASANLAATKMSECVLGQSK | S255F, L452R, |
| | RVDFCGKGYHLMSFPQSAPHGVVFLHVTYVPAQEKNFT | T478K, D614G, |
| | TAPAICHDGKAHFPREGVFVSNGTHWFVTQRNFYEPQIIT | P681R, and |
| | TDNTFVSGNCDVVIGIVNNTVYDPLQPELDSFKEELDKYF | D950N |
| | KNHTSPDVDLGDISGINASVVNIQKEIDRLNEVAKNLNESL | |
| | IDLQELGKYEQYIKWPWYIWLGFIAGLIAIVMVTIMLCCMT | |
| | SCCSCLKGCCSCGSCCKFDEDDSEPVLKGVKLHYT | |
| 13 | atgtttgtctttcttgtcttattgccactagtctctagtcagtgtgttaatcttacaaccag | Nucleotide |
| | aactcaattaccacctgcatacactaattctttcacacgtggtgtttattaccctgac | sequence/ORF |
| | aaagtattcagatcctcagtattacattcaactcaggacttgttcttacctttcttctcc | (5′ to 3′ end) of |
| | aatgttacttggttccatgctatacatgtctctgggaccaatggtactaagaggtttg | a codon- |
| | ataaccctgtcctaccatttaatgatggtgtttatttcgcttccattgagaagtctaac | optimized |
| | ataataagaggctggatatttggtactactttagattcgaagacccagtccctactt | SARS-CoV-2 S |
| | attgttaataacgctactaatgttgttattaaagtctgtgaatttcaattctgtaatgatc | antigen |
| | cattcttgggtgtttctaaccacaagaacaacaagagttggatggaaagtgagttc | sequence based |
| | agagtttattctagtgcgaataattgcactttcgaatatgtctctcagcctttccttatg | on the Wuhan- |
| | gaccttgaaggtaaacagggtaatttcaagaatcttagggaatttgtgtttaagaat | Hu-1 reference |
| | attgatggttatttcaagatatattctaagcacacgcctattaatttagtgcgtgatctc | strain |
| | cctcagggtttctcggctttagaaccattggtagatttgccaataggtattaacatca | (#NC_045512) |
| | ctaggtttcaaactttacttgctttacatagaagttatttgactcctggtgattcttcttca | and optimized |
| | ggttggacagctggtgctgcagcttattatgtgggttatcttcaacctaggactttcct | for vaccinia, |
| | attgaaatataatgagaatggaaccattacagatgctgtagactgtgcacttgacc | which is further |
| | ctctctcagaaacaaagtgtacgttgaaatccttcactgtagagaaaggaatctat | modified to |
| | caaacttctaactttagagtccaaccaacagaatctattgttagatttcctaatatta | encode for an S |
| | caaacttgtgccctttcggtgaagtatttaacgccaccaaatttgcatctgtttatgctt | antigen that |
| | ggaacaggaagagaatcagcaactgtgttgctgattattctgtcctatataattccg | includes |
| | catcattctccacatttaagtgttatggagtgtctcctactaaattaaatgatctctgct | mutations of the |
| | ttactaatgtctatgcagattcatttgtaattagaggtgatgaagtcagacaaatcg | B.1.621 variant |
| | ctccagggcaaactggaaagattgctgattataattataaattaccagatgacttta | lineage, |
| | caggctgcgttatagcttggaattctaacaatcttgattctaaggttggtggtaattat | including T95N, |
| | aattacctgtatagattgtttaggaagtctaatctcaaacctttcgagagagatatttc | Y144S, Y145N, |
| | aactgaaatctatcaggccggtagcacaccttgtaatggtgttaaaggatttaattg | R346K, E484K, |
| | ttactttcctttacaatcatatggtttccaacccacttatggtgttggttaccaaccata | N501Y, D614G, |
| | cagagtagtagtactttcatttgaacttctacatgcaccagcaactgtttgtggacct | P681H, and |
| | aagaagtctactaatttggttaagaacaaatgtgtcaatttcaacttcaatggtttaa | D950N |
| | caggcacaggtgttcttactgagtctaacaagaagtttctgcctttccaacaatttg | |
| | gcagagacattgctgacactactgatgctgtccgtgatccacagacacttgagatt | |
| | cttgacattacaccatgttcatttggtggtgtcagtgttataacaccaggaacaaat | |
| | acttctaaccaggttgctgttctttatcagggtgttaactgcacagaagtccctgttgc | |
| | tattcatgcagatcaacttactcctacttggcgtgtttattctacaggttctaatgtattt | |
| | caaacacgtgcaggctgtttaataggagctgaacatgtcaacaactcatatgagt | |
| | gtgacatacccattggtgcaggtatatgcgctagttatcagactcagactaattctc | |
| | atcggcgggcacgtagtgtagctagtcaatccatcattgcctacactatgtcacttg | |
| | gtgcagagaattcagttgcttactctaataactctattgccatacccacaaactttac | |
| | tattagtgttaccacagaaattctaccagtgtctatgaccaagacatcagtagattg | |
| | tacaatgtacatttgtggtgattcaactgaatgcagcaatctattgttgcaatatggc | |
| | agtttctgtacacaattaaaccgtgctttaactggaatagctgttgaacaagacaa | |
| | gaacacccaagaagtatttgcacaagtcaaacaaatttacaagacaccaccaa | |
| | ttaaagatttcggtggatttaatttctcacaaatattaccagatccatctaaaccaag | |
| | caagaggtcatttattgaagatctactattcaacaaagtgacacttgcagatgctg | |
| | gcttcatcaaacaatatggtgattgccttggtgatattgctgctagagacctcatttgt | |
| | gcacagaagtttaacggccttactgtattgccacctttgctcacagatgaaatgatt | |
| | gctcaatacacttctgcactgttagcgggtacaatcacttctggttggacctttggtg | |
| | caggtgctgcattacaaataccatttgctatgcaaatggcttataggtttaatggtatt | |
| | ggagttacacagaatgttctctatgagaaccagaaattgattgccaaccaatttaa | |
| | tagtgctattggcaagattcaagactcactttcttccacagcaagtgcacttggtaa | |
| | acttcagaatgtggtcaaccagaatgcacaagctttaaacacgcttgttaaacaa | |
| | cttagctccaactttggtgcaatttcaagtgtattaaatgatatcctttcacgtcttgac | |
| | aaagttgaggctgaagtgcaaattgataggttgatcacaggcagacttcaaagtt | |
| | tgcagacatatgtgactcaacaattaattagagctgcagaaatcagagcttctgct | |
| | aatcttgctgctactaagatgtcagagtgtgtacttggacaatctaagagagttgat | |
| | ttctgtggaaagggctatcatcttatgtccttccctcagtcagcacctcatggtgtagt | |
| | cttcttgcatgtgacttatgtccctgcacaagagaagaacttcacaactgctcctgc | |
| | catttgtcatgatggtaaagcacactttcctcgtgaaggtgtctttgtttcaaatggca | |
| | cacactggtttgtaacacaaaggaatttctatgaaccacaaatcattactacaga | |
| | caacacatttgtgtctggtaactgtgatgttgtaataggaattgtcaacaacacagtt | |
| | tatgatcctttgcaacctgaattagactcattcaaggaggagttagataaatatttca | |
| | agaatcatacatcaccagatgttgatttaggtgacatctctggcattaatgcttcagt | |
| | tgtaaacattcagaaagaaattgaccgcctcaatgaggttgccaagaatttaaat | |
| | gaatctctcatcgatctccaagaacttggaaagtatgagcagtatatcaaatggc | |
| | catggtacatttggctaggtttcatagctggcttgattgccatagtaatggtgacaatt | |
| | atgctttgctgtatgaccagttgctgtagttgtctcaagggctgttgttcttgtggatcct | |
| | gctgcaaatttgatgaagacgactctgagccagtgctcaaaggagtcaaattac | |
| | attacacataa | |
| 14 | MFVFLVLLPLVSSQCVNLTTRTQLPPAYTNSFTRGVYYPD | Amino acid |
| | KVFRSSVLHSTQDLFLPFFSNVTWFHAIHVSGTNGTKRF | sequence (N- to |
| | DNPVLPFNDGVYFASIEKSNIIRGWIFGTTLDSKTQSLLIVN | C-terminus) of a |
| | NATNVVIKVCEFQFCNDPFLGVSNHKNNKSWMESEFRV | codon-optimized |
| | YSSANNCTFEYVSQPFLMDLEGKQGNFKNLREFVFKNID | SARS-CoV-2 S |
| | GYFKIYSKHTPINLVRDLPQGFSALEPLVDLPIGINITRFQT | antigen |
| | LLALHRSYLTPGDSSSGWTAGAAAYYVGYLQPRTFLLKY | sequence based |
| | NENGTITDAVDCALDPLSETKCTLKSFTVEKGIYQTSNFR | on the Wuhan- |
| | VQPTESIVRFPNITNLCPFGEVFNATKFASVYAWNRKRIS | Hu-1 reference |
| | NCVADYSVLYNSASFSTFKCYGVSPTKLNDLCFTNVYAD | strain |
| | SFVIRGDEVRQIAPGQTGKIADYNYKLPDDFTGCVIAWNS | (#NC_045512) |
| | NNLDSKVGGNYNYLYRLFRKSNLKPFERDISTEIYQAGST | and optimized |
| | PCNGVKGFNCYFPLQSYGFQPTYGVGYQPYRVVVLSFE | for vaccinia, |
| | LLHAPATVCGPKKSTNLVKNKCVNFNFNGLTGTGVLTES | which is further |
| | NKKFLPFQQFGRDIADTTDAVRDPQTLEILDITPCSFGGV | modified to |
| | SVITPGTNTSNQVAVLYQGVNCTEVPVAIHADQLTPTWR | encode for an S |
| | VYSTGSNVFQTRAGCLIGAEHVNNSYECDIPIGAGICASY | antigen that |
| | QTQTNSHRRARSVASQSIIAYTMSLGAENSVAYSNNSIAI | includes |
| | PTNFTISVTTEILPVSMTKTSVDCTMYICGDSTECSNLLLQ | mutations of the |
| | YGSFCTQLNRALTGIAVEQDKNTQEVFAQVKQIYKTPPIK | B.1.621 variant |
| | DFGGFNFSQILPDPSKPSKRSFIEDLLFNKVTLADAGFIKQ | lineage, |
| | YGDCLGDIAARDLICAQKFNGLTVLPPLLTDEMIAQYTSAL | including T95N, |
| | LAGTITSGWTFGAGAALQIPFAMQMAYRFNGIGVTQNVL | Y144S, Y145N, |
| | YENQKLIANQFNSAIGKIQDSLSSTASALGKLQNVVNQNA | R346K, E484K, |
| | QALNTLVKQLSSNFGAISSVLNDILSRLDKVEAEVQIDRLIT | N501Y, D614G, |
| | GRLQSLQTYVTQQLIRAAEIRASANLAATKMSECVLGQSK | P681H, and |
| | RVDFCGKGYHLMSFPQSAPHGVVFLHVTYVPAQEKNFT | D950N |
| | TAPAICHDGKAHFPREGVFVSNGTHWFVTQRNFYEPQIIT | |
| | TDNTFVSGNCDVVIGIVNNTVYDPLQPELDSFKEELDKYF | |
| | KNHTSPDVDLGDISGINASVVNIQKEIDRLNEVAKNLNESL | |
| | IDLQELGKYEQYIKWPWYIWLGFIAGLIAIVMVTIMLCCMT | |
| | SCCSCLKGCCSCGSCCKFDEDDSEPVLKGVKLHYT | |
| 15 | atgtttgtctttcttgtcttattgctactagtctctagtcagtgtgttaatcttacaaccag | Nucleotide |
| | aactcaattaccacctgcatacactaattctttcacacgtggtgtttattaccctgac | sequence/ORF |
| | aaagtattcagatcctcagtattacattcaactcaggacttgttcttacctttcttctcc | (5′ to 3′ end) of |
| | aatgttacttggttccatgctatacatgtctctgggaccaatggtactaagaggtttg | a codon- |
| | ataaccctgtcctaccatttaatgatggtgtttatttcgcttccactgagaagtctaac | optimized |
| | ataataagaggctggatatttggtactactttagattcgaagacccagtccctactt | SARS-CoV-2 S |
| | attgttaataacgctactaatgttgttattaaagtctgtgaatttcaattctttaatgatc | antigen |
| | cattcttgggtgtttaccacaagaacaacaagagttggatggaaagtgagttcag | sequence based |
| | agtttattctagtgcgaataattgcactttcgaatatgtctctcagcctttccttatgga | on the Wuhan- |
| | ccttgaaggtaaacagggtaatttcaagaatcttagcgaatttgtgtttaagaatatt | Hu-1 reference |
| | gatggttatttcaagatatattctaagcacacgcctattaatttagtgcgtggtctccc | strain |
| | tcagggtttctcggctttagaaccattggtagatttgccaataggtattaacatcact | (#NC_045512) |
| | aggtttcaaactttattacatagaagttatttgactcctggtgattcttcttcaggttgga | and optimized |
| | cagctggtgctgcagcttattatgtgggttatcttcaacctaggactttcctattgaaa | for vaccinia, |
| | tataatgagaatggaaccattacagatgctgtagactgtgcacttgaccctctctc | which is further |
| | agaaacaaagtgtacgttgaaatccttcactgtagagaaaggaatctatcaaact | modified to |
| | tctaactttagagtccaaccaacagaatctattgttagatttcctaatattacaaactt | encode for an S |
| | gtgccctttcggtgaagtatttaacgccaccagatttgcatctgtttatgcttggaac | antigen that |
| | aggaagagaatcagcaactgtgttgctgattattctgtcctatataattccgcatcat | includes |
| | tctccacatttaagtgttatggagtgtctcctactaaattaaatgatctctgctttacta | mutations of the |
| | atgtctatgcagattcatttgtaattagaggtgatgaagtcagacaaatcgctccag | C.1.2 variant |
| | ggcaaactggaaagattgctgattataattataaattaccagatgactttacaggc | lineage, |
| | tgcgttatagcttggaattctaacaatcttgattctaaggttggtggtaatcataatta | including P9L, |
| | cctgtatagattgtttaggaagtctaatctcaaacctttcgagagagatatttcaact | C136F, R190S, |
| | gaaatctatcaggccggtagcacaccttgtaatggtgttaaaggatttaattgttact | D215G, |
| | ttcctttacaatcatatggtttccaacccacttatggtgttggttaccaaccatacaga | Del242/243, |
| | gtagtagtactttcatttgaacttctacatgcaccagcaactgtttgtggacctaaga | Y449Y, E484K, |
| | agtctactaatttggttaagaacaaatgtgtcaatttcaacttcaatggtttaacagg | N501Y, D614G, |
| | cacaggtgttcttactgagtctaacaagaagtttctgcctttccaacaatttggcag | H655Y, N679K, |
| | agacattgctgacactactgatgctgtccgtgatccacagacacttgagattcttga | T7161, and |
| | cattacaccatgttcatttggtggtgtcagtgttataacaccaggaacaaatacttct | T859N |
| | aaccaggttgctgttctttatcagggtgttaactgcacagaagtccctgttgctattc | |
| | atgcagatcaacttactcctacttggcgtgtttattctacaggttctaatgtatttcaaa | |
| | cacgtgcaggctgtttaataggagctgaatatgtcaacaactcatatgagtgtgac | |
| | atacccattggtgcaggtatatgcgctagttatcagactcagactaagtctcctcgg | |
| | cgggcacgtagtgtagctagtcaatccatcattgcctacactatgtcacttggtgca | |
| | gagaattcagttgcttactctaataactctattgccatacccataaactttactattag | |
| | tgttaccacagaaattctaccagtgtctatgaccaagacatcagtagattgtacaa | |
| | tgtacatttgtggtgattcaactgaatgcagcaatctattgttgcaatatggcagtttct | |
| | gtacacaattaaaccgtgctttaactggaatagctgttgaacaagacaagaaca | |
| | cccaagaagtatttgcacaagtcaaacaaatttacaagacaccaccaattaaa | |
| | gatttcggtggatttaatttctcacaaatattaccagatccatctaaaccaagcaag | |
| | aggtcatttattgaagatctactattcaacaaagtgacacttgcagatgctggcttc | |
| | atcaaacaatatggtgattgccttggtgatattgctgctagagacctcatttgtgcac | |
| | agaagtttaacggccttaatgtattgccacctttgctcacagatgaaatgattgctc | |
| | aatacacttctgcactgttagcgggtacaatcacttctggttggacctttggtgcag | |
| | gtgctgcattacaaataccatttgctatgcaaatggcttataggtttaatggtattgg | |
| | agttacacagaatgttctctatgagaaccagaaattgattgccaaccaatttaata | |
| | gtgctattggcaagattcaagactcactttcttccacagcaagtgcacttggtaaac | |
| | ttcaagatgtggtcaaccagaatgcacaagctttaaacacgcttgttaaacaactt | |
| | agctccaactttggtgcaatttcaagtgtattaaatgatatcctttcacgtcttgacaa | |
| | agttgaggctgaagtgcaaattgataggttgatcacaggcagacttcaaagtttg | |
| | cagacatatgtgactcaacaattaattagagctgcagaaatcagagcttctgcta | |
| | atcttgctgctactaagatgtcagagtgtgtacttggacaatctaagagagttgattt | |
| | ctgtggaaagggctatcatcttatgtccttccctcagtcagcacctcatggtgtagtc | |
| | ttcttgcatgtgacttatgtccctgcacaagagaagaacttcacaactgctcctgcc | |
| | atttgtcatgatggtaaagcacactttcctcgtgaaggtgtctttgtttcaaatggcac | |
| | acactggtttgtaacacaaaggaatttctatgaaccacaaatcattactacagac | |
| | aacacatttgtgtctggtaactgtgatgttgtaataggaattgtcaacaacacagttt | |
| | atgatcctttgcaacctgaattagactcattcaaggaggagttagataaatatttca | |
| | agaatcatacatcaccagatgttgatttaggtgacatctctggcattaatgcttcagt | |
| | tgtaaacattcagaaagaaattgaccgcctcaatgaggttgccaagaatttaaat | |
| | gaatctctcatcgatctccaagaacttggaaagtatgagcagtatatcaaatggc | |
| | catggtacatttggctaggtttcatagctggcttgattgccatagtaatggtgacaatt | |
| | atgctttgctgtatgaccagttgctgtagttgtctcaagggctgttgttcttgtggatcct | |
| | gctgcaaatttgatgaagacgactctgagccagtgctcaaaggagtcaaattac | |
| | attacacataa | |
| 16 | MFVFLVLLLLVSSQCVNLTTRTQLPPAYTNSFTRGVYYPD | Amino acid |
| | KVFRSSVLHSTQDLFLPFFSNVTWFHAIHVSGTNGTKRF | sequence (N- to |
| | DNPVLPFNDGVYFASTEKSNIIRGWIFGTTLDSKTQSLLIV | C-terminus) of a |
| | NNATNVVIKVCEFQFFNDPFLGVYHKNNKSWMESEFRVY | codon-optimized |
| | SSANNCTFEYVSQPFLMDLEGKQGNFKNLSEFVFKNIDG | SARS-CoV-2 S |
| | YFKIYSKHTPINLVRGLPQGFSALEPLVDLPIGINITRFQTL | antigen |
| | LHRSYLTPGDSSSGWTAGAAAYYVGYLQPRTFLLKYNEN | sequence based |
| | GTITDAVDCALDPLSETKCTLKSFTVEKGIYQTSNFRVQP | on the Wuhan- |
| | TESIVRFPNITNLCPFGEVFNATRFASVYAWNRKRISNCV | Hu-1 reference |
| | ADYSVLYNSASFSTFKCYGVSPTKLNDLCFTNVYADSFVI | strain |
| | RGDEVRQIAPGQTGKIADYNYKLPDDFTGCVIAWNSNNL | (#NC_045512) |
| | DSKVGGNHNYLYRLFRKSNLKPFERDISTEIYQAGSTPCN | and optimized |
| | GVKGFNCYFPLQSYGFQPTYGVGYQPYRVVVLSFELLHA | for vaccinia, |
| | PATVCGPKKSTNLVKNKCVNFNFNGLTGTGVLTESNKKF | which is further |
| | LPFQQFGRDIADTTDAVRDPQTLEILDITPCSFGGVSVITP | modified to |
| | GTNTSNQVAVLYQGVNCTEVPVAIHADQLTPTWRVYSTG | encode for an S |
| | SNVFQTRAGCLIGAEYVNNSYECDIPIGAGICASYQTQTK | antigen that |
| | SPRRARSVASQSIIAYTMSLGAENSVAYSNNSIAIPINFTIS | includes |
| | VTTEILPVSMTKTSVDCTMYICGDSTECSNLLLQYGSFCT | mutations of the |
| | QLNRALTGIAVEQDKNTQEVFAQVKQIYKTPPIKDFGGFN | C.1.2 variant |
| | FSQILPDPSKPSKRSFIEDLLFNKVTLADAGFIKQYGDCLG | lineage, |
| | DIAARDLICAQKFNGLNVLPPLLTDEMIAQYTSALLAGTITS | including P9L, |
| | GWTFGAGAALQIPFAMQMAYRFNGIGVTQNVLYENQKLI | C136F, R190S, |
| | ANQFNSAIGKIQDSLSSTASALGKLQDVVNQNAQALNTLV | D215G, |
| | KQLSSNFGAISSVLNDILSRLDKVEAEVQIDRLITGRLQSL | Del242/243, |
| | QTYVTQQLIRAAEIRASANLAATKMSECVLGQSKRVDFC | Y449Y, E484K, |
| | GKGYHLMSFPQSAPHGVVFLHVTYVPAQEKNFTTAPAIC | N501Y, D614G, |
| | HDGKAHFPREGVFVSNGTHWFVTQRNFYEPQIITTDNTF | H655Y, N679K, |
| | VSGNCDVVIGIVNNTVYDPLQPELDSFKEELDKYFKNHTS | T716, and |
| | PDVDLGDISGINASVVNIQKEIDRLNEVAKNLNESLIDLQEL | T859N |
| | GKYEQYIKWPWYIWLGFIAGLIAIVMVTIMLCCMTSCCSCL | |
| | KGCCSCGSCCKFDEDDSEPVLKGVKLHYT | |
| 17 | atgtctgataacggaccacagaatcagcgaaacgcaccacgcattacgtttggt | Nucleotide |
| | ggaccctcagattcaactggcagtaaccagaatggagaacgcagtggagcgc | sequence/ORF |
| | gatctaaacaacgtcggcctcaaggtttacccaataatactgcgtcttggttcacc | (5′ to 3′ end) of |
| | gctctcactcaacatggcaaggaaggccttaaattccctcgaggacaaggcgtt | a codon- |
| | ccaattaacaccaatagcagtccagatgaccaaattggctactaccgaagagct | optimized |
| | accagacgaattcgtggtggtgacggtaagatgaaagatctcagtccaagatgg | SARS-CoV-2 N |
| | tatttctactacctaggaactgggccagaagctggacttccctatggtgctaacaa | antigen |
| | agacggcatcatatgggttgcaactgagggagccttgaatacacctaaagatca | sequence based |
| | cattggcacccgcaatcctgctaacaatgctgcaatcgtgctacaacttcctcaag | on the Wuhan- |
| | gaacaacattgcctaaaggcttctacgcagaagggagcagaggcggcagtca | Hu-1 reference |
| | agcctcttctcgttcctcatcacgtagtcgcaacagttcaagaaattcaactccag | strain |
| | gcagcagtatgggaacttctcctgctagaatggctggcaatggctgtgatgctgct | (#NC_045512) |
| | cttgctttgctgctgcttgacagattgaaccagcttgagagcaagatgtctggtaaa | and optimized |
| | ggccaacaacaacaaggccaaactgtcactaagaaatctgctgctgaggcttct | for vaccinia, |
| | aagaagcctcggcagaaacgtactgccactaaagcatacaatgtaacacaag | which is further |
| | ctttcggcagacgtggtccagaacaaacccaaggaaactttggagaccagga | modified to |
| | actaatcagacaaggaactgattacaaacattggccgcaaattgcacaatttgct | encode for an N |
| | cccagcgcttcagcgttcttcggaatgtcgcgcattggcatggaagtcacaccttc | antigen that |
| | gggaacgtggttgacctacacaggtgccatcaaattggatgacaaagatccaa | includes |
| | atttcaaagatcaagtcatattgctgaataagcatattgacgcatacaagacattc | mutations of the |
| | ccaccaacagagcctaagaaggacaagaagaagaaggcttatgaaactcaa | B.1.617.2 |
| | gccttaccgcagagacagaagaaacagcaaactgtgactcttcttcctgctgca | variant lineage |
| | gatttggatgatttctccaaacaattgcaacaatccatgagcagtgctgactcaac | identified in |
| | tcaggcctaa | India, including |
| | | D63G, R203M, |
| | | G215C, and |
| | | D377Y |
| 18 | MSDNGPQNQRNAPRITFGGPSDSTGSNQNGERSGARS | Amino acid |
| | KQRRPQGLPNNTASWFTALTQHGKEGLKFPRGQGVPIN | sequence (N- to |
| | TNSSPDDQIGYYRRATRRIRGGDGKMKDLSPRWYFYYL | C-terminus) of a |
| | GTGPEAGLPYGANKDGIIWVATEGALNTPKDHIGTRNPA | codon-optimized |
| | NNAAIVLQLPQGTTLPKGFYAEGSRGGSQASSRSSSRSR | SARS-CoV-2 N |
| | NSSRNSTPGSSMGTSPARMAGNGCDAALALLLLDRLNQ | antigen |
| | LESKMSGKGQQQQGQTVTKKSAAEASKKPRQKRTATKA | sequence based |
| | YNVTQAFGRRGPEQTQGNFGDQELIRQGTDYKHWPQIA | on the Wuhan- |
| | QFAPSASAFFGMSRIGMEVTPSGTWLTYTGAIKLDDKDP | Hu-1 reference |
| | NFKDQVILLNKHIDAYKTFPPTEPKKDKKKKAYETQALPQ | strain |
| | RQKKQQTVTLLPAADLDDFSKQLQQSMSSADSTQA | (#NC_045512) |
| | | and optimized |
| | | for vaccinia, |
| | | which is further |
| | | modified to |
| | | encode for an N |
| | | antigen that |
| | | includes |
| | | mutations of the |
| | | B.1.617.2 |
| | | variant lineage |
| | | identified in |
| | | India, including |
| | | D63G, R203M, |
| | | G215C, and |
| | | D377Y |
| 19 | atgtctgataacggaccacagaatcagcgaaacgcactacgcattacgtttggt | Nucleotide |
| | ggaccctcagattcaactggcagtaaccagaatggagaacgcagtggagcgc | sequence/ORF |
| | gatctaaacaacgtcggcctcaaggtttacccaataatactgcgtcttggttcacc | (5′ to 3′ end) of |
| | gctctcactcaacatggcaaggaagaccttaaattccctcgaggacaaggcgtt | a codon- |
| | ccaattaacaccaatagcagtccagatgaccaaattggctactaccgaagagct | optimized |
| | accagacgaattcgtggtggtgacggtaagatgaaagatctcagtccaagatgg | SARS-CoV-2 N |
| | tatttctactacctaggaactgggccagaagctggacttccctatggtgctaacaa | antigen |
| | agacggcatcatatgggttgcaactgagggagccttgaatacacctaaagatca | sequence based |
| | cattggcacccgcaatcctgctaacaatgctgcaatcgtgctacaacttcctcaag | on the Wuhan- |
| | gaacaacattgcctaaaggcttctacgcagaagggagcagaggcggcagtca | Hu-1 reference |
| | agcctcttctcgttcctcatcacgtagtcgcaacagttcaagaaattcaactccag | strain |
| | gcagcagtaaacgaacttctcctgctagaatggctggcaatggcggtgatgctg | (#NC_045512) |
| | ctcttgctttgctgctgcttgacagattgaaccagcttgagagcaagatgtctggta | and optimized |
| | aaggccaacaacaacaaggccaaactgtcactaagaaatctgctgctgaggct | for vaccinia, |
| | tctaagaagcctcggcagaaacgtactgccactaaagcatacaatgtaacaca | which is further |
| | agctttcggcagacgtggtccagaacaaacccaaggaaactttggagaccag | modified to |
| | gaactaatcagacaaggaactgattacaaacattggccgcaaattgcacaattt | encode for an N |
| | gctcccagcgcttcagcgttcttcggaatgtcgcgcattggcatggaagtcacac | antigen that |
| | cttcgggaacgtggttgacctacacaggtgccatcaaattggatgacaaagatc | includes |
| | caaatttcaaagatcaagtcatattgctgaataagcatattgacgcatacaagac | mutations of the |
| | attcccaccaacagagcctaagaaggacaagaagaagaaggctgatgaaac | C.1.2 variant |
| | tcaagccttaccgcacagacagaagaaacagcaaactgtgactcttcttcctgct | lineage, |
| | gcagatttggatgatttctccaaacaattgcaacaatccatgagcagtgctgactc | including P13L, |
| | aactcaggcctaa | R203K, G204R, |
| | | and Q384H |
| 20 | MSDNGPQNQRNALRITFGGPSDSTGSNQNGERSGARSK | Amino acid |
| | QRRPQGLPNNTASWFTALTQHGKEDLKFPRGQGVPINT | sequence (N- to |
| | NSSPDDQIGYYRRATRRIRGGDGKMKDLSPRWYFYYLG | C-terminus) of a |
| | TGPEAGLPYGANKDGIIWVATEGALNTPKDHIGTRNPAN | codon-optimized |
| | NAAIVLQLPQGTTLPKGFYAEGSRGGSQASSRSSSRSRN | SARS-CoV-2 N |
| | SSRNSTPGSSKRTSPARMAGNGGDAALALLLLDRLNQLE | antigen |
| | SKMSGKGQQQQGQTVTKKSAAEASKKPRQKRTATKAYN | sequence based |
| | VTQAFGRRGPEQTQGNFGDQELIRQGTDYKHWPQIAQF | on the Wuhan- |
| | APSASAFFGMSRIGMEVTPSGTWLTYTGAIKLDDKDPNF | Hu-1 reference |
| | KDQVILLNKHIDAYKTFPPTEPKKDKKKKADETQALPHRQ | strain |
| | KKQQTVTLLPAADLDDFSKQLQQSMSSADSTQA | (#NC_045512) |
| | | and optimized |
| | | for vaccinia, |
| | | which is further |
| | | modified to |
| | | encode for an N |
| | | antigen that |
| | | includes |
| | | mutations of the |
| | | C.1.2 variant |
| | | lineage, |
| | | including P13L, |
| | | R203K, G204R, |
| | | and Q384H |
| 21 | atgtttgtctttcttgtcttattgccactagtctctagtcagtgtgttaactttacaaccag | Nucleotide |
| | aactcaattaccacctgcatacactaattctttcacacgtggtgtttattaccctgac | sequence/ORF |
| | aaagtattcagatcctcagtattacattcaactcaggacttgttcttacctttcttctcc | (5′ to 3′ end) of |
| | aatgttacttggttccatgctatacatgtctctgggaccaatggtactaagaggtttg | a codon- |
| | ctaaccctgtcctaccatttaatgatggtgtttatttcgcttccactgagaagtctaac | optimized |
| | ataataagaggctggatatttggtactactttagattcgaagacccagtccctactt | SARS-CoV-2 S |
| | attgttaataacgctactaatgttgttattaaagtctgtgaatttcaattctgtaatgatc | antigen |
| | cattcttgggtgtttattaccacaagaacaacaagagttggatggaaagtgagttc | sequence based |
| | agagtttattctagtgcgaataattgcactttcgaatatgtctctcagcctttccttatg | on the Wuhan- |
| | gaccttgaaggtaaacagggtaatttcaagaatcttagggaatttgtgtttaagaat | Hu-1 reference |
| | attgatggttatttcaagatatattctaagcacacgcctattaatttagtgcgtggtctc | strain |
| | cctcagggtttctcggctttagaaccattggtagatttgccaataggtattaacatca | (#NC_045512) |
| | ctaggtttcaaactttacatataagttatttgactcctggtgattcttcttcaggttggac | and optimized |
| | agctggtgctgcagcttattatgtgggttatcttcaacctaggactttcctattgaaat | for vaccinia, |
| | ataatgagaatggaaccattacagatgctgtagactgtgcacttgaccctctctca | which is further |
| | gaaacaaagtgtacgttgaaatccttcactgtagagaaaggaatctatcaaactt | modified to |
| | ctaactttagagtccaaccaacagaatctattgttagatttcctaatattacaaactt | encode for an S |
| | gtgccctttcggtgaagtatttaacgccaccagatttgcatctgtttatgcttggaac | antigen that |
| | aggaagagaatcagcaactgtgttgctgattattctgtcctatataattccgcatcat | includes |
| | tctccacatttaagtgttatggagtgtctcctactaaattaaatgatctctgctttacta | mutations of the |
| | atgtctatgcagattcatttgtaattagaggtgatgaagtcagacaaatcgctccag | B.1.351 variant |
| | ggcaaactggaaatattgctgattataattataaattaccagatgactttacaggct | lineage, |
| | gcgttatagcttggaattctaacaatcttgattctaaggttggtggtaattataattac | including L18F, |
| | ctgtatagattgtttaggaagtctaatctcaaacctttcgagagagatatttcaactg | D80A, D215G, |
| | aaatctatcaggccggtagcacaccttgtaatggtgttaaaggatttaattgttacttt | Del242-244, |
| | cctttacaatcatatggtttccaacccacttatggtgttggttaccaaccatacagag | R246I, N501Y, |
| | tagtagtactttcatttgaacttctacatgcaccagcaactgtttgtggacctaagaa | E484K, K417N, |
| | gtctactaatttggttaagaacaaatgtgtcaatttcaacttcaatggtttaacaggc | D614G, and |
| | acaggtgttcttactgagtctaacaagaagtttctgcctttccaacaatttggcaga | A701V |
| | gacattgctgacactactgatgctgtccgtgatccacagacacttgagattcttgac | |
| | attacaccatgttcatttggtggtgtcagtgttataacaccaggaacaaatacttcta | |
| | accaggttgctgttctttatcagggtgttaactgcacagaagtccctgttgctattcat | |
| | gcagatcaacttactcctacttggcgtgtttattctacaggttctaatgtatttcaaac | |
| | acgtgcaggctgtttaataggagctgaacatgtcaacaactcatatgagtgtgac | |
| | atacccattggtgcaggtatatgcgctagttatcagactcagactaattctcctcgg | |
| | cgggcacgtagtgtagctagtcaatccatcattgcctacactatgtcacttggtgta | |
| | gagaattcagttgcttactctaataactctattgccatacccacaaactttactattag | |
| | tgttaccacagaaattctaccagtgtctatgaccaagacatcagtagattgtacaa | |
| | tgtacatttgtggtgattcaactgaatgcagcaatctattgttgcaatatggcagtttct | |
| | gtacacaattaaaccgtgctttaactggaatagctgttgaacaagacaagaaca | |
| | cccaagaagtatttgcacaagtcaaacaaatttacaagacaccaccaattaaa | |
| | gatttcggtggatttaatttctcacaaatattaccagatccatctaaaccaagcaag | |
| | aggtcatttattgaagatctactattcaacaaagtgacacttgcagatgctggcttc | |
| | atcaaacaatatggtgattgccttggtgatattgctgctagagacctcatttgtgcac | |
| | agaagtttaacggccttactgtattgccacctttgctcacagatgaaatgattgctc | |
| | aatacacttctgcactgttagcgggtacaatcacttctggttggacctttggtgcag | |
| | gtgctgcattacaaataccatttgctatgcaaatggcttataggtttaatggtattgg | |
| | agttacacagaatgttctctatgagaaccagaaattgattgccaaccaatttaata | |
| | gtgctattggcaagattcaagactcactttcttccacagcaagtgcacttggtaaac | |
| | ttcaagatgtggtcaaccagaatgcacaagctttaaacacgcttgttaaacaactt | |
| | agctccaactttggtgcaatttcaagtgtattaaatgatatcctttcacgtcttgacaa | |
| | agttgaggctgaagtgcaaattgataggttgatcacaggcagacttcaaagtttg | |
| | cagacatatgtgactcaacaattaattagagctgcagaaatcagagcttctgcta | |
| | atcttgctgctactaagatgtcagagtgtgtacttggacaatctaagagagttgattt | |
| | ctgtggaaagggctatcatcttatgtccttccctcagtcagcacctcatggtgtagtc | |
| | ttcttgcatgtgacttatgtccctgcacaagagaagaacttcacaactgctcctgcc | |
| | atttgtcatgatggtaaagcacactttcctcgtgaaggtgtctttgtttcaaatggcac | |
| | acactggtttgtaacacaaaggaatttctatgaaccacaaatcattactacagac | |
| | aacacatttgtgtctggtaactgtgatgttgtaataggaattgtcaacaacacagttt | |
| | atgatcctttgcaacctgaattagactcattcaaggaggagttagataaatatttca | |
| | agaatcatacatcaccagatgttgatttaggtgacatctctggcattaatgcttcagt | |
| | tgtaaacattcagaaagaaattgaccgcctcaatgaggttgccaagaatttaaat | |
| | gaatctctcatcgatctccaagaacttggaaagtatgagcagtatatcaaatggc | |
| | catggtacatttggctaggtttcatagctggcttgattgccatagtaatggtgacaatt | |
| | atgctttgctgtatgaccagttgctgtagttgtctcaagggctgttgttcttgtggatcct | |
| | gctgcaaatttgatgaagacgactctgagccagtgctcaaaggagtcaaattac | |
| | attacacataa | |
| 22 | MFVFLVLLPLVSSQCVNFTTRTQLPPAYTNSFTRGVYYPD | Amino acid |
| | KVFRSSVLHSTQDLFLPFFSNVTWFHAIHVSGTNGTKRFA | sequence (N- to |
| | NPVLPFNDGVYFASTEKSNIIRGWIFGTTLDSKTQSLLIVN | C-terminus) of a |
| | NATNVVIKVCEFQFQNDPFLGVYYHKNNKSWMESEFRVY | codon-optimized |
| | SSANNCTFEYVSQPFLMDLEGKQGNFKNLREFVFKNIDG | SARS-CoV-2 S |
| | YFKIYSKHTPINLVRGLPQGFSALEPLVDLPIGINITRFQTL | antigen |
| | HISYLTPGDSSSGWTAGAAAYYVGYLQPRTFLLKYNENG | sequence based |
| | TITDAVDCALDPLSETKCTLKSFTVEKGIYQTSNFRVQPTE | on the Wuhan- |
| | SIVRFPNITNLCPFGEVFNATRFASVYAWNRKRISNCVAD | Hu-1 reference |
| | YSVLYNSASFSTFKCYGVSPTKLNDLCFTNVYADSFVIRG | strain |
| | DEVRQIAPGQTGNIADYNYKLPDDFTGCVIAWNSNNLDS | (#NC_045512) |
| | KVGGNYNYLYRLFRKSNLKPFERDISTEIYQAGSTPCNGV | and optimized |
| | KGFNCYFPLQSYGFQPTYGVGYQPYRVVVLSFELLHAPA | for vaccinia, |
| | TVCGPKKSTNLVKNKCVNFNFNGLTGTGVLTESNKKFLP | which is further |
| | FQQFGRDIADTTDAVRDPQTLEILDITPCSFGGVSVITPGT | modified to |
| | NTSNQVAVLYQGVNCTEVPVAIHADQLTPTWRVYSTGSN | encode for an S |
| | VFQTRAGCLIGAEHVNNSYECDIPIGAGICASYQTQTNSP | antigen that |
| | RRARSVASQSIIAYTMSLGVENSVAYSNNSIAIPTNFTISVT | includes |
| | TEILPVSMTKTSVDCTMYICGDSTECSNLLLQYGSFCTQL | mutations of the |
| | NRALTGIAVEQDKNTQEVFAQVKQIYKTPPIKDFGGFNFS | B.1.351 variant |
| | QILPDPSKPSKRSFIEDLLFNKVTLADAGFIKQYGDCLGDI | lineage, |
| | AARDLICAQKFNGLTVLPPLLTDEMIAQYTSALLAGTITSG | including L18F, |
| | WTFGAGAALQIPFAMQMAYRFNGIGVTQNVLYENQKLIA | D80A, D215G, |
| | NQFNSAIGKIQDSLSSTASALGKLQDVVNQNAQALNTLVK | Del242-244, |
| | QLSSNFGAISSVLNDILSRLDKVEAEVQIDRLITGRLQSLQ | R2461, N501Y, |
| | TYVTQQLIRAAEIRASANLAATKMSECVLGQSKRVDFCGK | E484K, K417N, |
| | GYHLMSFPQSAPHGVVFLHVTYVPAQEKNFTTAPAICHD | D614G, and |
| | GKAHFPREGVFVSNGTHWFVTQRNFYEPQIITTDNTFVS | A701V |
| | GNCDVVIGIVNNTVYDPLQPELDSFKEELDKYFKNHTSPD | |
| | VDLGDISGINASVVNIQKEIDRLNEVAKNLNESLIDLQELG | |
| | KYEQYIKWPWYIWLGFIAGLIAIVMVTIMLCCMTSCCSCLK | |
| | GCCSCGSCCKFDEDDSEPVLKGVKLHYT | |
| 23 | atgtctgataacggaccacagaatcagcgaaacgcaccacgcattacgtttggt | Nucleotide |
| | ggaccctcagattcaactggcagtaaccagaatggagaacgcagtggagcgc | sequence/ORF |
| | gatctaaacaacgtcggcctcaaggtttacccaataatactgcgtcttggttcacc | (5′ to 3′ end) of |
| | gctctcactcaacatggcaaggaagaccttaaattccctcgaggacaaggcgtt | a codon- |
| | ccaattaacaccaatagcagtccagatgaccaaattggctactaccgaagagct | optimized |
| | accagacgaattcgtggtggtgacggtaagatgaaagatctcagtccaagatgg | SARS-CoV-2 N |
| | tatttctactacctaggaactgggccagaagctggacttccctatggtgctaacaa | antigen |
| | agacggcatcatatgggttgcaactgagggagccttgaatacacctaaagatca | sequence based |
| | cattggcacccgcaatcctgctaacaatgctgcaatcgtgctacaacttcctcaag | on the Wuhan- |
| | gaacaacattgcctaaaggcttctacgcagaagggagcagaggcggcagtca | Hu-1 reference |
| | agcctcttctcgttcctcatcacgtagtcgcaacagttcaagaaattcaactccag | strain |
| | gcagcagtagaggaatctctcctgctagaatggctggcaatggcggtgatgctg | (#NC_045512) |
| | ctcttgctttgctgctgcttgacagattgaaccagcttgagagcaagatgtctggta | and optimized |
| | aaggccaacaacaacaaggccaaactgtcactaagaaatctgctgctgaggct | for vaccinia, |
| | tctaagaagcctcggcagaaacgtactgccactaaagcatacaatgtaacaca | which is further |
| | agctttcggcagacgtggtccagaacaaacccaaggaaactttggagaccag | modified to |
| | gaactaatcagacaaggaactgattacaaacattggccgcaaattgcacaattt | encode for an N |
| | gctcccagcgcttcagcgttcttcggaatgtcgcgcattggcatggaagtcacac | antigen that |
| | cttcgggaacgtggttgacctacacaggtgccatcaaattggatgacaaagatc | includes |
| | caaatttcaaagatcaagtcatattgctgaataagcatattgacgcatacaagac | mutations of the |
| | attcccaccaacagagcctaagaaggacaagaagaagaaggctgatgaaac | B.1.351 variant |
| | tcaagccttaccgcagagacagaagaaacagcaaactgtgactcttcttcctgct | lineage, |
| | gcagatttggatgatttctccaaacaattgcaacaatccatgagcagtgctgactc | including T205I |
| | aactcaggcctaa | |
| 24 | MSDNGPQNQRNAPRITFGGPSDSTGSNQNGERSGARS | Amino acid |
| | KQRRPQGLPNNTASWFTALTQHGKEDLKFPRGQGVPIN | sequence (N- to |
| | TNSSPDDQIGYYRRATRRIRGGDGKMKDLSPRWYFYYL | C-terminus) of a |
| | GTGPEAGLPYGANKDGIIWVATEGALNTPKDHIGTRNPA | codon-optimized |
| | NNAAIVLQLPQGTTLPKGFYAEGSRGGSQASSRSSSRSR | SARS-CoV-2 N |
| | NSSRNSTPGSSRGISPARMAGNGGDAALALLLLDRLNQL | antigen |
| | ESKMSGKGQQQQGQTVTKKSAAEASKKPRQKRTATKAY | sequence based |
| | NVTQAFGRRGPEQTQGNFGDQELIRQGTDYKHWPQIAQ | on the Wuhan- |
| | FAPSASAFFGMSRIGMEVTPSGTWLTYTGAIKLDDKDPN | Hu-1 reference |
| | FKDQVILLNKHIDAYKTFPPTEPKKDKKKKADETQALPQR | strain |
| | QKKQQTVTLLPAADLDDFSKQLQQSMSSADSTQA | (#NC_045512) |
| | | and optimized |
| | | for vaccinia, |
| | | which is further |
| | | modified to |
| | | encode for an N |
| | | antigen that |
| | | includes |
| | | mutations of the |
| | | B.1.351 variant |
| | | lineage, |
| | | including T205I |
| 25 | atgtttgtctttcttgtcttattgccactagtctctagtcagtgtgttaatcttacaaccag | Nucleotide |
| | aactcaattaccacctgcatacactaattctttcacacgtggtgtttattaccctgac | sequence/ORF |
| | aaagtattcagatcctcagtattacattcaactcaggacttgttcttacctttcttctcc | (5′ to 3′ end) of |
| | aatgttacttggttccatgttatatctgggaccaatggtactaagaggtttgataacc | a codon- |
| | ctgtcctaccatttaatgatggtgtttatttcgcttccattgagaagtctaacataataa | optimized |
| | gaggctggatatttggtactactttagattcgaagacccagtccctacttattgttaat | SARS-CoV-2 S |
| | aacgctactaatgttgttattaaagtctgtgaatttcaattctgtaatgatccattcttgg | antigen |
| | atcacaagaacaacaagagttggatggaaagtgagttcagagtttattctagtgc | sequence based |
| | gaataattgcactttcgaatatgtctctcagcctttccttatggaccttgaaggtaaa | on the Wuhan- |
| | cagggtaatttcaagaatcttagggaatttgtgtttaagaatattgatggttatttcaa | Hu-1 reference |
| | gatatattctaagcacacgcctattatagtgcgtgaacctgaagatctccctcagg | strain |
| | gtttctcggctttagaaccattggtagatttgccaataggtattaacatcactaggttt | (#NC_045512) |
| | caaactttacttgctttacatagaagttatttgactcctggtgattcttcttcaggttgga | and optimized |
| | cagctggtgctgcagcttattatgtgggttatcttcaacctaggactttcctattgaaa | for vaccinia, |
| | tataatgagaatggaaccattacagatgctgtagactgtgcacttgaccctctctc | which is further |
| | agaaacaaagtgtacgttgaaatccttcactgtagagaaaggaatctatcaaact | modified to |
| | tctaactttagagtccaaccaacagaatctattgttagatttcctaatattacaaactt | encode for an S |
| | gtgccctttcgacgaagtatttaacgccaccagatttgcatctgtttatgcttggaac | antigen that |
| | aggaagagaatcagcaactgtgttgctgattattctgtcctatataatctcgcacca | includes |
| | ttcttcacatttaagtgttatggagtgtctcctactaaattaaatgatctctgctttacta | mutations of the |
| | atgtctatgcagattcatttgtaattagaggtgatgaagtcagacaaatcgctccag | B.1.1.529/BA.1 |
| | ggcaaactggaaatattgctgattataattataaattaccagatgactttacaggct | variant lineage, |
| | gcgttatagcttggaattctaacaaacttgattctaaggttagtggtaattataattac | including A67V, |
| | ctgtatagattgtttaggaagtctaatctcaaacctttcgagagagatatttcaactg | Del69-70 (HV), |
| | aaatctatcaggccggtaacaaaccttgtaatggtgttgcaggatttaattgttacttt | T95I, G142D, |
| | cctttacgatcatatagtttccgacccacttatggtgttggtcaccaaccatacaga | Del143-145 |
| | gtagtagtactttcatttgaacttctacatgcaccagcaactgtttgtggacctaaga | (VYY), Del211 |
| | agtctactaatttggttaagaacaaatgtgtcaatttcaacttcaatggtttgaaagg | (N), L212I, |
| | cacaggtgttcttactgagtctaacaagaagtttctgcctttccaacaatttggcag | Ins214 (EPE), |
| | agacattgctgacactactgatgctgtccgtgatccacagacacttgagattcttga | G339D, S371L, |
| | cattacaccatgttcatttggtggtgtcagtgttataacaccaggaacaaatacttct | S373P, S375F, |
| | aaccaggttgctgttctttatcagggtgttaactgcacagaagtccctgttgctattc | K417N, N440K, |
| | atgcagatcaacttactcctacttggcgtgtttattctacaggttctaatgtatttcaaa | G446S, S477N, |
| | cacgtgcaggctgtttaataggagctgaatatgtcaacaactcatatgagtgtgac | T478K, E484A, |
| | atacccattggtgcaggtatatgcgctagttatcagactcagactaagtctcatcg | Q493R, G496S, |
| | gcgggcacgtagtgtagctagtcaatccatcattgcctacactatgtcacttggtgc | Q498R, N501Y, |
| | agagaattcagttgcttactctaataactctattgccatacccacaaactttactatta | Y505H, T547K, |
| | gtgttaccacagaaattctaccagtgtctatgaccaagacatcagtagattgtaca | D614G, H655Y, |
| | atgtacatttgtggtgattcaactgaatgcagcaatctattgttgcaatatggcagttt | N679K, P681H, |
| | ctgtacacaattaaagcgtgctttaactggaatagctgttgaacaagacaagaac | N764K, D796Y, |
| | acccaagaagtatttgcacaagtcaaacaaatttacaagacaccaccaattaa | N856K, Q954H, |
| | gtatttcggtggatttaatttctcacaaatattaccagatccatctaaaccaagcaa | N969K, and |
| | gaggtcatttattgaagatctactattcaacaaagtgacacttgcagatgctggctt | L981F |
| | catcaaacaatatggtgattgccttggtgatattgctgctagagacctcatttgtgca | |
| | cagaagtttaagggccttactgtattgccacctttgctcacagatgaaatgattgct | |
| | caatacacttctgcactgttagcgggtacaatcacttctggttggacctttggtgcag | |
| | gtgctgcattacaaataccatttgctatgcaaatggcttataggtttaatggtattgg | |
| | agttacacagaatgttctctatgagaaccagaaattgattgccaaccaatttaata | |
| | gtgctattggcaagattcaagactcactttcttccacagcaagtgcacttggtaaac | |
| | ttcaagatgtggtcaaccacaatgcacaagctttaaacacgcttgttaaacaactt | |
| | agctccaagtttggtgcaatttcaagtgtattaaatgatatcttctcacgtcttgacaa | |
| | agttgaggctgaagtgcaaattgataggttgatcacaggcagacttcaaagtttg | |
| | cagacatatgtgactcaacaattaattagagctgcagaaatcagagcttctgcta | |
| | atcttgctgctactaagatgtcagagtgtgtacttggacaatctaagagagttgattt | |
| | ctgtggaaagggctatcatcttatgtccttccctcagtcagcacctcatggtgtagtc | |
| | ttcttgcatgtgacttatgtccctgcacaagagaagaacttcacaactgctcctgcc | |
| | atttgtcatgatggtaaagcacactttcctcgtgaaggtgtctttgtttcaaatggcac | |
| | acactggtttgtaacacaaaggaatttctatgaaccacaaatcattactacagac | |
| | aacacatttgtgtctggtaactgtgatgttgtaataggaattgtcaacaacacagttt | |
| | atgatcctttgcaacctgaattagactcattcaaggaggagttagataaatatttca | |
| | agaatcatacatcaccagatgttgatttaggtgacatctctggcattaatgcttcagt | |
| | tgtaaacattcagaaagaaattgaccgcctcaatgaggttgccaagaatttaaat | |
| | gaatctctcatcgatctccaagaacttggaaagtatgagcagtatatcaaatggc | |
| | catggtacatttggctaggtttcatagctggcttgattgccatagtaatggtgacaatt | |
| | atgctttgctgtatgaccagttgctgtagttgtctcaagggctgttgttcttgtggatcct | |
| | gctgcaaatttgatgaagacgactctgagccagtgctcaaaggagtcaaattac | |
| | attacacataa | |
| 26 | MFVFLVLLPLVSSQCVNLTTRTQLPPAYTNSFTRGVYYPD | Amino acid |
| | KVFRSSVLHSTQDLFLPFFSNVTWFHVISGTNGTKRFDN | sequence (N- to |
| | PVLPFNDGVYFASIEKSNIIRGWIFGTTLDSKTQSLLIVNNA | C-terminus) of a |
| | TNVVIKVCEFQFCNDPFLDHKNNKSWMESEFRVYSSANN | codon-optimized |
| | CTFEYVSQPFLMDLEGKQGNFKNLREFVFKNIDGYFKIYS | SARS-CoV-2 S |
| | KHTPIIVREPEDLPQGFSALEPLVDLPIGINITRFQTLLALH | antigen |
| | RSYLTPGDSSSGWTAGAAAYYVGYLQPRTFLLKYNENG | sequence based |
| | TITDAVDCALDPLSETKCTLKSFTVEKGIYQTSNFRVQPTE | on the Wuhan- |
| | SIVRFPNITNLCPFDEVFNATRFASVYAWNRKRISNCVAD | Hu-1 reference |
| | YSVLYNLAPFFTFKCYGVSPTKLNDLCFTNVYADSFVIRG | strain |
| | DEVRQIAPGQTGNIADYNYKLPDDFTGCVIAWNSNKLDS | (#NC_045512) |
| | KVSGNYNYLYRLFRKSNLKPFERDISTEIYQAGNKPCNGV | and optimized |
| | AGFNCYFPLRSYSFRPTYGVGHQPYRVVVLSFELLHAPA | for vaccinia, |
| | TVCGPKKSTNLVKNKCVNFNFNGLKGTGVLTESNKKFLP | which is further |
| | FQQFGRDIADTTDAVRDPQTLEILDITPCSFGGVSVITPGT | modified to |
| | NTSNQVAVLYQGVNCTEVPVAIHADQLTPTWRVYSTGSN | encode for an S |
| | VFQTRAGCLIGAEYVNNSYECDIPIGAGICASYQTQTKSH | antigen that |
| | RRARSVASQSIIAYTMSLGAENSVAYSNNSIAIPTNFTISVT | includes |
| | TEILPVSMTKTSVDCTMYICGDSTECSNLLLQYGSFCTQL | mutations of the |
| | KRALTGIAVEQDKNTQEVFAQVKQIYKTPPIKYFGGFNFS | B.1.1.529/BA.1 |
| | QILPDPSKPSKRSFIEDLLFNKVTLADAGFIKQYGDCLGDI | variant lineage, |
| | AARDLICAQKFKGLTVLPPLLTDEMIAQYTSALLAGTITSG | including A67V, |
| | WTFGAGAALQIPFAMQMAYRFNGIGVTQNVLYENQKLIA | Del69-70 (HV), |
| | NQFNSAIGKIQDSLSSTASALGKLQDVVNHNAQALNTLVK | T95I, G142D, |
| | QLSSKFGAISSVLNDIFSRLDKVEAEVQIDRLITGRLQSLQ | Del143-145 |
| | TYVTQQLIRAAEIRASANLAATKMSECVLGQSKRVDFCGK | (VYY), Del211 |
| | GYHLMSFPQSAPHGVVFLHVTYVPAQEKNFTTAPAICHD | (N), L212I, |
| | GKAHFPREGVFVSNGTHWFVTQRNFYEPQIITTDNTFVS | Ins214 (EPE), |
| | GNCDVVIGIVNNTVYDPLQPELDSFKEELDKYFKNHTSPD | G339D, S371L, |
| | VDLGDISGINASVVNIQKEIDRLNEVAKNLNESLIDLQELG | S373P, S375F, |
| | KYEQYIKWPWYIWLGFIAGLIAIVMVTIMLCCMTSCCSCLK | K417N, N440K, |
| | GCCSCGSCCKFDEDDSEPVLKGVKLHYT | G446S, S477N, |
| | | T478K, E484A, |
| | | Q493R, G496S, |
| | | Q498R, N501Y, |
| | | Y505H, T547K, |
| | | D614G, H655Y, |
| | | N679K, P681H, |
| | | N764K, D796Y, |
| | | N856K, Q954H, |
| | | N969K, and |
| | | L981F |
| 27 | atgtctgataacggaccacagaatcagcgaaacgcactacgcattacgtttggt | Nucleotide |
| | ggaccctcagattcaactggcagtaaccagaatggaggagcgcgatctaaac | sequence/ORF |
| | aacgtcggcctcaaggtttacccaataatactgcgtcttggttcaccgctctcactc | (5′ to 3′ end) of |
| | aacatggcaaggaagaccttaaattccctcgaggacaaggcgttccaattaac | a codon- |
| | accaatagcagtccagatgaccaaattggctactaccgaagagctaccagacg | optimized |
| | aattcgtggtggtgacggtaagatgaaagatctcagtccaagatggtatttctact | SARS-CoV-2 N |
| | acctaggaactgggccagaagctggacttccctatggtgctaacaaagacggc | antigen |
| | atcatatgggttgcaactgagggagccttgaatacacctaaagatcacattggca | sequence based |
| | cccgcaatcctgctaacaatgctgcaatcgtgctacaacttcctcaaggaacaac | on the Wuhan- |
| | attgcctaaaggcttctacgcagaagggagcagaggcggcagtcaagcctcttc | Hu-1 reference |
| | tcgttcctcatcacgtagtcgcaacagttcaagaaattcaactccaggcagcagt | strain |
| | aaacgaacttctcctgctagaatggctggcaatggcggtgatgctgctcttgctttg | (#NC_045512) |
| | ctgctgcttgacagattgaaccagcttgagagcaagatgtctggtaaaggccaa | and optimized |
| | caacaacaaggccaaactgtcactaagaaatctgctgctgaggcttctaagaa | for vaccinia, |
| | gcctcggcagaaacgtactgccactaaagcatacaatgtaacacaagctttcgg | which is further |
| | cagacgtggtccagaacaaacccaaggaaactttggagaccaggaactaatc | modified to |
| | agacaaggaactgattacaaacattggccgcaaattgcacaatttgctcccagc | encode for an N |
| | gcttcagcgttcttcggaatgtcgcgcattggcatggaagtcacaccttcgggaac | antigen that |
| | gtggttgacctacacaggtgccatcaaattggatgacaaagatccaaatttcaaa | includes |
| | gatcaagtcatattgctgaataagcatattgacgcatacaagacattcccaccaa | mutations of the |
| | cagagcctaagaaggacaagaagaagaaggctgatgaaactcaagccttac | B.1.1.529/BA.1 |
| | cgcagagacagaagaaacagcaaactgtgactcttcttcctgctgcagatttgg | variant lineage, |
| | atgatttctccaaacaattgcaacaatccatgagcagtgctgactcaactcaggc | including P13L, |
| | ctaa | Del31-33 (ERS), |
| | | R203K, G204R |
| 28 | MSDNGPQNQRNALRITFGGPSDSTGSNQNGGARSKQR | Amino acid |
| | RPQGLPNNTASWFTALTQHGKEDLKFPRGQGVPINTNSS | sequence (N- to |
| | PDDQIGYYRRATRRIRGGDGKMKDLSPRWYFYYLGTGP | C-terminus) of a |
| | EAGLPYGANKDGIIWVATEGALNTPKDHIGTRNPANNAAI | codon-optimized |
| | VLQLPQGTTLPKGFYAEGSRGGSQASSRSSSRSRNSSR | SARS-CoV-2 N |
| | NSTPGSSKRTSPARMAGNGGDAALALLLLDRLNQLESKM | antigen |
| | SGKGQQQQGQTVTKKSAAEASKKPRQKRTATKAYNVTQ | sequence based |
| | AFGRRGPEQTQGNFGDQELIRQGTDYKHWPQIAQFAPS | on the Wuhan- |
| | ASAFFGMSRIGMEVTPSGTWLTYTGAIKLDDKDPNFKDQ | Hu-1 reference |
| | VILLNKHIDAYKTFPPTEPKKDKKKKADETQALPQRQKKQ | strain |
| | QTVTLLPAADLDDFSKQLQQSMSSADSTQA | (#NC_045512) |
| | | and optimized |
| | | for vaccinia, |
| | | which is further |
| | | modified to |
| | | encode for an N |
| | | antigen that |
| | | includes |
| | | mutations of the |
| | | B.1.1.529/BA.1 |
| | | variant lineage, |
| | | including P13L, |
| | | Del31-33 (ERS), |
| | | R203K, G204R |
| 29 | atgtttgtctttcttgtcttattgccactagtctctagtcagtgtgttaactttacaaacag | Nucleotide |
| | aactcaattaccatctgcatacactaattctttcacacgtggtgtttattaccctgaca | sequence/ORF |
| | aagtattcagatcctcagtattacattcaactcaggacttgttcttacctttcttctcca | (5′ to 3′ end) of |
| | atgttacttggttccatgctatacatgtctctgggaccaatggtactaagaggtttgat | a codon- |
| | aaccctgtcctaccatttaatgatggtgtttatttcgcttccactgagaagtctaacat | optimized |
| | aataagaggctggatatttggtactactttagattcgaagacccagtccctacttatt | SARS-CoV-2 S |
| | gttaataacgctactaatgttgttattaaagtctgtgaatttcaattctgtaattatccat | antigen |
| | tcttgggtgtttattaccacaagaacaacaagagttggatggaaagtgagttcag | sequence based |
| | agtttattctagtgcgaataattgcactttcgaatatgtctctcagcctttccttatgga | on the Wuhan- |
| | ccttgaaggtaaacagggtaatttcaagaatcttagcgaatttgtgtttaagaatatt | Hu-1 reference |
| | gatggttatttcaagatatattctaagcacacgcctattaatttagtgcgtgatctccc | strain |
| | tcagggtttctcggctttagaaccattggtagatttgccaataggtattaacatcact | (#NC_045512) |
| | aggtttcaaactttacttgctttacatagaagttatttgactcctggtgattcttcttcag | and optimized |
| | gttggacagctggtgctgcagcttattatgtgggttatcttcaacctaggactttccta | for vaccinia, |
| | ttgaaatataatgagaatggaaccattacagatgctgtagactgtgcacttgaccc | which is further |
| | tctctcagaaacaaagtgtacgttgaaatccttcactgtagagaaaggaatctatc | modified to |
| | aaacttctaactttagagtccaaccaacagaatctattgttagatttcctaatattac | encode for an S |
| | aaacttgtgccctttcggtgaagtatttaacgccaccagatttgcatctgtttatgctt | antigen that |
| | ggaacaggaagagaatcagcaactgtgttgctgattattctgtcctatataattccg | includes |
| | catcattctccacatttaagtgttatggagtgtctcctactaaattaaatgatctctgct | mutations of the |
| | ttactaatgtctatgcagattcatttgtaattagaggtgatgaagtcagacaaatcg | P.1 variant |
| | ctccagggcaaactggaacgattgctgattataattataaattaccagatgacttta | lineage, |
| | caggctgcgttatagcttggaattctaacaatcttgattctaaggttggtggtaattat | including L18F, |
| | aattacctgtatagattgtttaggaagtctaatctcaaacctttcgagagagatatttc | T20N, P26S, |
| | aactgaaatctatcaggccggtagcacaccttgtaatggtgttaaaggatttaattg | D138Y, R190S, |
| | ttactttcctttacaatcatatggtttccaacccacttatggtgttggttaccaaccata | K417T, E484K, |
| | cagagtagtagtactttcatttgaacttctacatgcaccagcaactgtttgtggacct | N501Y, D614G, |
| | aagaagtctactaatttggttaagaacaaatgtgtcaatttcaacttcaatggtttaa | H655Y, T1027I, |
| | caggcacaggtgttcttactgagtctaacaagaagtttctgcctttccaacaatttg | and V1167F |
| | gcagagacattgctgacactactgatgctgtccgtgatccacagacacttgagatt | |
| | cttgacattacaccatgttcatttggtggtgtcagtgttataacaccaggaacaaat | |
| | acttctaaccaggttgctgttctttatcagggtgttaactgcacagaagtccctgttgc | |
| | tattcatgcagatcaacttactcctacttggcgtgtttattctacaggttctaatgtattt | |
| | caaacacgtgcaggctgtttaataggagctgaatatgtcaacaactcatatgagt | |
| | gtgacatacccattggtgcaggtatatgcgctagttatcagactcagactaattctc | |
| | ctcggcgggcacgtagtgtagctagtcaatccatcattgcctacactatgtcacttg | |
| | gtgcagagaattcagttgcttactctaataactctattgccatacccacaaactttac | |
| | tattagtgttaccacagaaattctaccagtgtctatgaccaagacatcagtagattg | |
| | tacaatgtacatttgtggtgattcaactgaatgcagcaatctattgttgcaatatggc | |
| | agtttctgtacacaattaaaccgtgctttaactggaatagctgttgaacaagacaa | |
| | gaacacccaagaagtatttgcacaagtcaaacaaatttacaagacaccaccaa | |
| | ttaaagatttcggtggatttaatttctcacaaatattaccagatccatctaaaccaag | |
| | caagaggtcatttattgaagatctactattcaacaaagtgacacttgcagatgctg | |
| | gcttcatcaaacaatatggtgattgccttggtgatattgctgctagagacctcatttgt | |
| | gcacagaagtttaacggccttactgtattgccacctttgctcacagatgaaatgatt | |
| | gctcaatacacttctgcactgttagcgggtacaatcacttctggttggacctttggtg | |
| | caggtgctgcattacaaataccatttgctatgcaaatggcttataggtttaatggtatt | |
| | ggagttacacagaatgttctctatgagaaccagaaattgattgccaaccaatttaa | |
| | tagtgctattggcaagattcaagactcactttcttccacagcaagtgcacttggtaa | |
| | acttcaagatgtggtcaaccagaatgcacaagctttaaacacgcttgttaaacaa | |
| | cttagctccaactttggtgcaatttcaagtgtattaaatgatatcctttcacgtcttgac | |
| | aaagttgaggctgaagtgcaaattgataggttgatcacaggcagacttcaaagtt | |
| | tgcagacatatgtgactcaacaattaattagagctgcagaaatcagagcttctgct | |
| | aatcttgctgctattaagatgtcagagtgtgtacttggacaatctaagagagttgatt | |
| | tctgtggaaagggctatcatcttatgtccttccctcagtcagcacctcatggtgtagt | |
| | cttcttgcatgtgacttatgtccctgcacaagagaagaacttcacaactgctcctgc | |
| | catttgtcatgatggtaaagcacactttcctcgtgaaggtgtctttgtttcaaatggca | |
| | cacactggtttgtaacacaaaggaatttctatgaaccacaaatcattactacaga | |
| | caacacatttgtgtctggtaactgtgatgttgtaataggaattgtcaacaacacagtt | |
| | tatgatcctttgcaacctgaattagactcattcaaggaggagttagataaatatttca | |
| | agaatcatacatcaccagatgttgatttaggtgacatctctggcattaatgcttcattt | |
| | gtaaacattcagaaagaaattgaccgcctcaatgaggttgccaagaatttaaatg | |
| | aatctctcatcgatctccaagaacttggaaagtatgagcagtatatcaaatggcc | |
| | atggtacatttggctaggtttcatagctggcttgattgccatagtaatggtgacaatt | |
| | atgctttgctgtatgaccagttgctgtagttgtctcaagggctgttgttcttgtggatcct | |
| | gctgcaaatttgatgaagacgactctgagccagtgctcaaaggagtcaaattac | |
| | attacacataa | |
| 30 | MFVFLVLLPLVSSQCVNFTNRTQLPSAYTNSFTRGVYYP | Amino acid |
| | DKVFRSSVLHSTQDLFLPFFSNVTWFHAIHVSGTNGTKR | sequence (N- to |
| | FDNPVLPFNDGVYFASTEKSNIIRGWIFGTTLDSKTQSLLI | C-terminus) of a |
| | VNNATNVVIKVCEFQFCNYPFLGVYYHKNNKSWMESEFR | codon-optimized |
| | VYSSANNCTFEYVSQPFLMDLEGKQGNFKNLSEFVFKNI | SARS-CoV-2 S |
| | DGYFKIYSKHTPINLVRDLPQGFSALEPLVDLPIGINITRFQ | antigen |
| | TLLALHRSYLTPGDSSSGWTAGAAAYYVGYLQPRTFLLK | sequence based |
| | YNENGTITDAVDCALDPLSETKCTLKSFTVEKGIYQTSNF | on the Wuhan- |
| | RVQPTESIVRFPNITNLCPFGEVFNATRFASVYAWNRKRI | Hu-1 reference |
| | SNCVADYSVLYNSASFSTFKCYGVSPTKLNDLCFTNVYA | strain |
| | DSFVIRGDEVRQIAPGQTGTIADYNYKLPDDFTGCVIAWN | (#NC_045512) |
| | SNNLDSKVGGNYNYLYRLFRKSNLKPFERDISTEIYQAGS | and optimized |
| | TPCNGVKGFNCYFPLQSYGFQPTYGVGYQPYRVVVLSF | for vaccinia, |
| | ELLHAPATVCGPKKSTNLVKNKCVNFNFNGLTGTGVLTE | which is further |
| | SNKKFLPFQQFGRDIADTTDAVRDPQTLEILDITPCSFGG | modified to |
| | VSVITPGTNTSNQVAVLYQGVNCTEVPVAIHADQLTPTW | encode for an S |
| | RVYSTGSNVFQTRAGCLIGAEYVNNSYECDIPIGAGICAS | antigen that |
| | YQTQTNSPRRARSVASQSIIAYTMSLGAENSVAYSNNSIA | includes |
| | IPTNFTISVTTEILPVSMTKTSVDCTMYICGDSTECSNLLLQ | mutations of the |
| | YGSFCTQLNRALTGIAVEQDKNTQEVFAQVKQIYKTPPIK | P.1 variant |
| | DFGGFNFSQILPDPSKPSKRSFIEDLLFNKVTLADAGFIKQ | lineage, |
| | YGDCLGDIAARDLICAQKFNGLTVLPPLLTDEMIAQYTSAL | including L18F, |
| | LAGTITSGWTFGAGAALQIPFAMQMAYRFNGIGVTQNVL | T20N, P26S, |
| | YENQKLIANQFNSAIGKIQDSLSSTASALGKLQDVVNQNA | D138Y, R190S, |
| | QALNTLVKQLSSNFGAISSVLNDILSRLDKVEAEVQIDRLIT | K417T, E484K, |
| | GRLQSLQTYVTQQLIRAAEIRASANLAAIKMSECVLGQSK | N501Y, D614G, |
| | RVDFCGKGYHLMSFPQSAPHGVVFLHVTYVPAQEKNFT | H655Y, T1027I, |
| | TAPAICHDGKAHFPREGVFVSNGTHWFVTQRNFYEPQIIT | and V1167F |
| | TDNTFVSGNCDVVIGIVNNTVYDPLQPELDSFKEELDKYF | |
| | KNHTSPDVDLGDISGINASFVNIQKEIDRLNEVAKNLNESL | |
| | IDLQELGKYEQYIKWPWYIWLGFIAGLIAIVMVTIMLCCMT | |
| | SCCSCLKGCCSCGSCCKFDEDDSEPVLKGVKLHYT | |
| 31 | atgtctgataacggaccacagaatcagcgaaacgcaccacgcattacgtttggt | Nucleotide |
| | ggaccctcagattcaactggcagtaaccagaatggagaacgcagtggagcgc | sequence/ORF |
| | gatctaaacaacgtcggcctcaaggtttacccaataatactgcgtcttggttcacc | (5′ to 3′ end) of |
| | gctctcactcaacatggcaaggaagaccttaaattccctcgaggacaaggcgtt | a codon- |
| | ccaattaacaccaatagcagtcgagatgaccaaattggctactaccgaagagct | optimized |
| | accagacgaattcgtggtggtgacggtaagatgaaagatctcagtccaagatgg | SARS-CoV-2 N |
| | tatttctactacctaggaactgggccagaagctggacttccctatggtgctaacaa | antigen |
| | agacggcatcatatgggttgcaactgagggagccttgaatacacctaaagatca | sequence based |
| | cattggcacccgcaatcctgctaacaatgctgcaatcgtgctacaacttcctcaag | on the Wuhan- |
| | gaacaacattgcctaaaggcttctacgcagaagggagcagaggcggcagtca | Hu-1 reference |
| | agcctcttctcgttcctcatcacgtagtcgcaacagttcaagaaattcaactccag | strain |
| | gcagcagtaaacgaacttctcctgctagaatggctggcaatggcggtgatgctg | (#NC_045512) |
| | ctcttgctttgctgctgcttgacagattgaaccagcttgagagcaagatgtctggta | and optimized |
| | aaggccaacaacaacaaggccaaactgtcactaagaaatctgctgctgaggct | for vaccinia, |
| | tctaagaagcctcggcagaaacgtactgccactaaagcatacaatgtaacaca | which is further |
| | agctttcggcagacgtggtccagaacaaacccaaggaaactttggagaccag | modified to |
| | gaactaatcagacaaggaactgattacaaacattggccgcaaattgcacaattt | encode for an N |
| | gctcccagcgcttcagcgttcttcggaatgtcgcgcattggcatggaagtcacac | antigen that |
| | cttcgggaacgtggttgacctacacaggtgccatcaaattggatgacaaagatc | includes |
| | caaatttcaaagatcaagtcatattgctgaataagcatattgacgcatacaagac | mutations of the |
| | attcccaccaacagagcctaagaaggacaagaagaagaaggctgatgaaac | P.1 variant |
| | tcaagccttaccgcagagacagaagaaacagcaaactgtgactcttcttcctgct | lineage, |
| | gcagatttggatgatttctccaaacaattgcaacaatccatgagcagtgctgactc | including P80R, |
| | aactcaggcctaa | R203K, and |
| | | G204K |
| 32 | MSDNGPQNQRNAPRITFGGPSDSTGSNQNGERSGARS | Amino acid |
| | KQRRPQGLPNNTASWFTALTQHGKEDLKFPRGQGVPIN | sequence (N- to |
| | TNSSRDDQIGYYRRATRRIRGGDGKMKDLSPRWYFYYL | C-terminus) of a |
| | GTGPEAGLPYGANKDGIIWVATEGALNTPKDHIGTRNPA | codon-optimized |
| | NNAAIVLQLPQGTTLPKGFYAEGSRGGSQASSRSSSRSR | SARS-CoV-2 N |
| | NSSRNSTPGSSKRTSPARMAGNGGDAALALLLLDRLNQL | antigen |
| | ESKMSGKGQQQQGQTVTKKSAAEASKKPRQKRTATKAY | sequence based |
| | NVTQAFGRRGPEQTQGNFGDQELIRQGTDYKHWPQIAQ | on the Wuhan- |
| | FAPSASAFFGMSRIGMEVTPSGTWLTYTGAIKLDDKDPN | Hu-1 reference |
| | FKDQVILLNKHIDAYKTFPPTEPKKDKKKKADETQALPQR | strain |
| | QKKQQTVTLLPAADLDDFSKQLQQSMSSADSTQA | (#NC_045512) |
| | | and optimized |
| | | for vaccinia, |
| | | which is further |
| | | modified to |
| | | encode for an N |
| | | antigen that |
| | | includes |
| | | mutations of the |
| | | P.1 variant |
| | | lineage, |
| | | including P80R, |
| | | R203K, and |
| | | G204K |

[0078] In some embodiments, the vaccines and/or immunogenic compositions comprise one or more sMVA vectors, wherein the one or more sMVA vectors comprise one or more heterologous DNA sequences each comprising or consisting of a nucleotide sequence set forth in any one of SEQ ID NOs: 5, 9, 11, 13, 15, 21, 25, and 29, or a nucleotide sequence that is at least about 80% identical (e.g., at least about 80%, at least about 85%, at least about 90%, at least about 95%, at least about 96%, at least about 97%, at least about 98%, at least about 99%, or about 100% identical) to the nucleotide sequence set forth in any one of SEQ ID NOs: 5, 9, 11, 13, 15, 21, 25, and 29. In some embodiments, the vaccines and/or immunogenic compositions comprise one or more sMVA vectors, wherein the one or more sMVA vectors comprise one or more heterologous DNA sequences encoding a SARS-CoV-2 antigen (e.g., S protein) comprising or consisting of an amino acid sequence set forth in any one of SEQ ID NOs: 6, 10, 12, 14, 16, 22, 26, and 30, or an amino acid sequence that is at least about 80% identical (e.g., at least about 80%, at least about 85%, at least about 90%, at least about 95%, at least about 96%, at least about 97%, at least about 98%, at least about 99%, or about 100% identical) to the amino acid sequence set forth in any one of SEQ ID NOs: 6, 10, 12, 14, 16, 22, 26, and 30.

[0079] In some embodiments, the vaccines and/or immunogenic compositions comprise one or more sMVA vectors, wherein the one or more sMVA vectors comprise one or more heterologous DNA sequences each comprising or consisting of a nucleotide sequence set forth in any one of SEQ ID NOs: 7, 17, 19, 23, 27, and 31, or a nucleotide sequence that is at least about 80% identical (e.g., at least about 80%, at least about 85%, at least about 90%, at least about 95%, at least about 96%, at least about 97%, at least about 98%, at least about 99%, or about 100% identical) to the nucleotide sequence set forth in any one of SEQ ID NOs: 7, 17, 19, 23, 27, and 31. In some embodiments, the vaccines and/or immunogenic compositions comprise one or more sMVA vectors, wherein the one or more sMVA vectors comprise one or more heterologous DNA sequences encoding a SARS-CoV-2 antigen (e.g., N protein) comprising or consisting of an amino acid sequence set forth in any one of SEQ ID NOs: 8, 18, 20, 24, 28, and 32, or an amino acid sequence that is at least about 80% identical (e.g., at least about 80%, at least about 85%, at least about 90%, at least about 95%, at least about 96%, at least about 97%, at least about 98%, at least about 99%, or about 100% identical) to the amino acid sequence set forth in any one of SEQ ID NOs: 8, 18, 20, 24, 28, and 32.

[0080] In some embodiments, the vaccines and/or immunogenic compositions comprise one or more sMVA vectors, wherein the one or more sMVA vectors comprise one or more heterologous DNA sequences encoding an S protein and an N protein based on the ancestral Wuhan-Hu-1 reference strain. In certain of these embodiments, the heterologous DNA sequences comprise or consist of nucleotide sequences set forth in SEQ ID NOs: 5 and 7, respectively, or nucleotide sequences that are at least about 80% identical (e.g., at least about 80%, at least about 85%, at least about 90%, at least about 95%, at least about 96%, at least about 97%, at least about 98%, at least about 99%, or about 100% identical) to the nucleotide sequences set forth in SEQ ID NOs: 5 and 7, respectively. The corresponding S protein and N protein encoded by the heterologous DNA sequences comprise or consist of amino acid sequences set forth in SEQ ID NOs: 6 and 8, respectively, or amino acid sequences that are at least about 80% identical (e.g., at least about 80%, at least about 85%, at least about 90%, at least about 95%, at least about 96%, at least about 97%, at least about 98%, at least about 99%, or about 100% identical) to the amino acid sequences set forth in SEQ ID NOs: 6 and 8, respectively.

[0081] In some embodiments, the vaccines and/or immunogenic compositions comprise one or more sMVA vectors, wherein the one or more sMVA vectors comprise one or more heterologous DNA sequences encoding an S protein and an N protein based on the B.1.351 (Beta) strain. In certain of these embodiments, the heterologous DNA sequences comprise or consist of nucleotide sequences set forth in SEQ ID NOs: 21 and 23, respectively, or nucleotide sequences that are at least about 80% identical (e.g., at least about 80%, at least about 85%, at least about 90%, at least about 95%, at least about 96%, at least about 97%, at least about 98%, at least about 99%, or about 100% identical) to the nucleotide sequences set forth in SEQ ID NOs: 21 and 23, respectively. The corresponding S protein and N protein encoded by the heterologous DNA sequences comprise or consist of amino acid sequences set forth in SEQ ID NOs: 22 and 24, respectively, or amino acid sequences that are at least about 80% identical (e.g., at least about 80%, at least about 85%, at least about 90%, at least about 95%, at least about 96%, at least about 97%, at least about 98%, at least about 99%, or about 100% identical) to the amino acid sequences set forth in SEQ ID NOs: 22 and 24, respectively.

[0082] In some embodiments, the vaccines and/or immunogenic compositions comprise one or more sMVA vectors, wherein the one or more sMVA vectors comprise one or more heterologous DNA sequences encoding an S protein and an N protein based on the P.1 (Gamma) strain. In certain of these embodiments, the heterologous DNA sequences comprise or consist of nucleotide sequences set forth in SEQ ID NOs: 29 and 3′, respectively, or nucleotide sequences that are at least about 80% identical (e.g., at least about 80%, at least about 85%, at least about 90%, at least about 95%, at least about 96%, at least about 97%, at least about 98%, at least about 99%, or about 100% identical) to the nucleotide sequences set forth in SEQ ID NOs: 29 and 31, respectively. The corresponding S protein and N protein encoded by the heterologous DNA sequences comprise or consist of amino acid sequences set forth in SEQ ID NOs: 30 and 32, respectively, or amino acid sequences that are at least about 80% identical (e.g., at least about 80%, at least about 85%, at least about 90%, at least about 95%, at least about 96%, at least about 97%, at least about 98%, at least about 99%, or about 100% identical) to the amino acid sequences set forth in SEQ ID NOs: 30 and 32, respectively.

[0083] In some embodiments, the vaccines and/or immunogenic compositions comprise one or more sMVA vectors, wherein the one or more sMVA vectors comprise one or more heterologous DNA sequences encoding an S protein and an N protein based on the B.1.617.2 (Delta) strain. In certain of these embodiments, the heterologous DNA sequences comprise or consist of nucleotide sequences set forth in SEQ ID NOs: 9 and 17, respectively, or nucleotide sequences that are at least about 80% identical (e.g., at least about 80%, at least about 85%, at least about 90%, at least about 95%, at least about 96%, at least about 97%, at least about 98%, at least about 99%, or about 100% identical) to the nucleotide sequences set forth in SEQ ID NOs: 9 and 17, respectively. The corresponding S protein and N protein encoded by the heterologous DNA sequences comprise or consist of amino acid sequences set forth in SEQ ID NOs: 10 and 18, respectively, or amino acid sequences that are at least about 80% identical (e.g., at least about 80%, at least about 85%, at least about 90%, at least about 95%, at least about 96%, at least about 97%, at least about 98%, at least about 99%, or about 100% identical) to the amino acid sequences set forth in SEQ ID NOs: 10 and 18, respectively.

[0084] In some embodiments, the vaccines and/or immunogenic compositions comprise one or more sMVA vectors, wherein the one or more sMVA vectors comprise one or more heterologous DNA sequences encoding an S protein and an N protein based on the B.1.617.2 (Delta) strain. In certain of these embodiments, the heterologous DNA sequences comprise or consist of nucleotide sequences set forth in SEQ ID NOs: 11 and 17, respectively, or nucleotide sequences that are at least about 80% identical (e.g., at least about 80%, at least about 85%, at least about 90%, at least about 95%, at least about 96%, at least about 97%, at least about 98%, at least about 99%, or about 100% identical) to the nucleotide sequences set forth in SEQ ID NOs: 11 and 17, respectively. The corresponding S protein and N protein encoded by the heterologous DNA sequences comprise or consist of amino acid sequences set forth in SEQ ID NOs: 12 and 18, respectively, or amino acid sequences that are at least about 80% identical (e.g., at least about 80%, at least about 85%, at least about 90%, at least about 95%, at least about 96%, at least about 97%, at least about 98%, at least about 99%, or about 100% identical) to the amino acid sequences set forth in SEQ ID NOs: 12 and 18, respectively.

[0085] In some embodiments, the vaccines and/or immunogenic compositions comprise one or more sMVA vectors, wherein the one or more sMVA vectors comprise one or more heterologous DNA sequences encoding an S protein and an N protein based on the C.1.2 strain. In certain of these embodiments, the heterologous DNA sequences comprise or consist of nucleotide sequences set forth in SEQ ID NOs: 15 and 19, respectively, or nucleotide sequences that are at least about 80% identical (e.g., at least about 80%, at least about 85%, at least about 90%, at least about 95%, at least about 96%, at least about 97%, at least about 98%, at least about 99%, or about 100% identical) to the nucleotide sequences set forth in SEQ ID NOs: 15 and 19, respectively. The corresponding S protein and N protein encoded by the heterologous DNA sequences comprise or consist of amino acid sequences set forth in SEQ ID NOs: 16 and 20, respectively, or amino acid sequences that are at least about 80% identical (e.g., at least about 80%, at least about 85%, at least about 90%, at least about 95%, at least about 96%, at least about 97%, at least about 98%, at least about 99%, or about 100% identical) to the amino acid sequences set forth in SEQ ID NOs: 16 and 20, respectively.

[0086] In some embodiments, the vaccines and/or immunogenic compositions comprise one or more sMVA vectors, wherein the one or more sMVA vectors comprise one or more heterologous DNA sequences encoding an S protein and an N protein based on the B.1.1.529/BA.1 (Omicron) strain. In certain of these embodiments, the heterologous DNA sequences comprise or consist of nucleotide sequences set forth in SEQ ID NOs: 25 and 27, respectively, or nucleotide sequences that are at least about 80% identical (e.g., at least about 80%, at least about 85%, at least about 90%, at least about 95%, at least about 96%, at least about 97%, at least about 98%, at least about 99%, or about 100% identical) to the nucleotide sequences set forth in SEQ ID NOs: 25 and 27, respectively. The corresponding S protein and N protein encoded by the heterologous DNA sequences comprise or consist of amino acid sequences set forth in SEQ ID NOs: 26 and 28, respectively, or amino acid sequences that are at least about 80% identical (e.g., at least about 80%, at least about 85%, at least about 90%, at least about 95%, at least about 96%, at least about 97%, at least about 98%, at least about 99%, or about 100% identical) to the amino acid sequences set forth in SEQ ID NOs: 26 and 28, respectively.

[0087] In some embodiments, the vaccines and/or immunogenic compositions comprise one or more sMVA vectors, wherein the one or more sMVA vectors comprise one or more heterologous DNA sequences encoding a SARS-CoV-2 antigen (e.g., S protein, N protein) that has one or more mutations compared to the ancestral Wuhan-Hu-1 reference strain.

[0088] In some embodiments, the encoded mutant S protein based on the B.1.617.2 lineage comprises one or more of the following mutations: T19R, E156G, Del157/158, S255F, L452R, T478K, D614G, P681R, D950N, G142D, Del156/157, R158G, A222, L5F, R21T, T51I, H66Y, K77T, D80Y, T95I, G181V, R214H, P251L, D253A, V289I, V308L, A411S, G446V, T547I, A570S, T572I, Q613H, S640F, E661D, Q675H, T719I, P809S, A845S, 1850L, A879S, D979E, A1078S, H1101Y, D1127G, L1141W, G1167V, K1191N, G1291V, and V1264L. Other mutations such as K417T may also be included.

[0089] In some embodiments, the encoded mutant S protein based on VOC lineage B.1.351 (Beta) comprises one or more of the following mutations: L18F, D80A, D215G, Del242-244, R246I, N501Y, E484K, K417N, D614G, and A701V.

[0090] In some embodiments, the encoded mutant S protein based on VOC lineage P.1 (Gamma) comprises one or more of the following mutations: L18F, T20N, P26S, D138Y, R190S, K417T, E484K, N501Y, D614G, H655Y, T1027I, and V1167F.

[0091] In some embodiments, the encoded mutant S protein based on VOC lineage B.1.617.2 (Delta) comprises one or more of the following mutations: T19R, G142D, Del156-157, R158G, L452R, T478K, D614G, P681R, and D950N.

[0092] In some embodiments, the encoded mutant S protein based on VOC lineage B.1.617.2 (Delta) comprises one or more of the following mutations: T19R, K77T, Del157-158, L452R, T478K, D614G, P681R, and D950N.

[0093] In some embodiments, the encoded mutant S protein based on VOC lineage B.1.617.2 (Delta) comprises one or more of the following mutations: T19R, E156G, Del157-158, S255F, L452R, T478K, D614G, P681R, and D950N.

[0094] In some embodiments, the encoded mutant S protein based on VOC lineage B.1.617.2 (Delta) comprises one or more of the following mutations: T19R, L452R, T478K, D614G, P681R, and D950N and additionally one or more mutations comprising G142D, R158G, A222V, S255F, E156G, T95I, K77T or deletions Del156-157 or Del157-158.

[0095] In some embodiments, the encoded mutant S protein based on VOC lineage B.1.1.529/BA.1 (Omicron) comprises one or more of the following mutations: A67V, Del69-70 (HV), T95I, G142D, Del143-145 (VYY), Del211 (N), L212I, Ins214 (EPE), G339D, S371 L, S373P, S375F, K417N, N440K, G446S, S477N, T478K, E484A, Q493R, G496S, Q498R, N501Y, Y505H, T547K, D614G, H655Y, N679K, P681H, N764K, D796Y, N856K, Q954H, N969K, and L981F.

[0096] In some embodiments, the encoded mutant S protein based on VOC lineage BQ.1 (Omicron) comprises one or more of the following mutations: T191, Del24-26 (LPS), A27S, Del69-70 (HV), G142D, V213G, G339D, S371F, S373P, S375F, T376A, D405N, R408S, K417N, N440K, K444T, L452R, N460K, S477N, T478K, E484A, F486V, Q493Q, 0498R, N501Y, Y505H, D614G, H655Y, N679K, P681H, N764K, D796Y, 0954H, and N969K.

[0097] In some embodiments, the encoded mutant S protein based on VOC lineage BQ.1.1 (Omicron) comprises one or more of the following mutations: T191, Del24-26 (LPS), A27S, Del69-70 (HV), G142D, V213G, G339D, R346T, S371F, S373P, S375F, T376A, D405N, R408S, K417N, N440K, K444T, L452R, N460K, S477N, T478K, E484A, F486V, Q493Q, Q498R, N501Y, Y505H, D614G, H655Y, N679K, P681H, N764K, D796Y, Q954H, and N969K.

[0098] In some embodiments, the encoded mutant S protein based on VOC lineage XBB (Omicron) comprises one or more of the following mutations: T191, Del24-26 (LPS), A27S, V83A, G142D, Del144 (Y), H146Q, Q183E, V213E, G339H, R346T, L368I, S371F, S373P, S375F, T376A, D405N, R408S, K417N, N440K, V445P, G446S, N460K, S477N, T478K, E484A, F486S, F490S, R4930, 0498R, N501Y, Y505H, D614G, H655Y, N679K, P681H, N764K, D796Y, 0954H, and N969K.

[0099] In some embodiments, the encoded mutant N protein based on VOC lineage B.1.351 (Beta) comprises a T2051 mutation.

[0100] In some embodiments, the encoded mutant N protein based on VOC lineage P.1 (Gamma) comprises one or more of the following mutations: P80R, R203K, and G204R.

[0101] In some embodiments, the encoded mutant N protein based on VOC lineage P.1 (Gamma) comprises one or more of the following mutations: P80R, R203K, and G204K.

[0102] In some embodiments, the encoded mutant N protein based on VOC lineage B.1.617.2 (Delta) comprises one or more of the following mutations: D63G, R203M, G215C, and D377Y.

[0103] In some embodiments, the encoded mutant N protein based on VOC lineage B.1.617.2 (Delta) comprises one or more of the following mutations: D63G, R203M, and D377Y.

[0104] In some embodiments, the encoded mutant N protein based on VOC lineage B.1.617.2 (Delta) comprises one or more of the following mutations: D63G, R203M, D377Y, and R385K.

[0105] In some embodiments, the encoded mutant N protein based on VOC lineage B.1.1.529/BA.1 (Omicron) comprises one or more of the following mutations: P13L, Del31-33 (ERS), R203K, G204R.

[0106] In some embodiments, the encoded mutant N protein based on VOC lineage BQ.1 (Omicron) comprises one or more of the following mutations: P13L, Del31-33 (ERS), E136D, R203K, G204R, and S413R.

[0107] In some embodiments, the encoded mutant N protein based on VOC lineage BQ.1.1 (Omicron) comprises one or more of the following mutations: P13L, Del31-33 (ERS), E136D, R203K, G204R, and S413R.

[0108] In some embodiments, the encoded mutant N protein based on VOC lineage XBB (Omicron) comprises one or more of the following mutations: P13L, Del31-33 (ERS), R203K, G204R, and S413R.

[0109] In some embodiments, the heterologous DNA sequences encoding a SARS-CoV-2 antigen (e.g., S protein, N protein) further comprise a promoter to drive expression of the SARS-CoV-2 antigen. In some embodiments, the promotor is an mH5 promoter. Other frequently used promoters include, for example, elongation factor 1 alpha (EF1α) promoter, cytomegalovirus (CMV) immediate-early promoter (Greenaway et al., Gene 18: 355-360 (1982)), simian vacuolating virus 40 (SV40) early promoter (Fiers et al., Nature 273:113-120 (1978)), spleen focus-forming virus (SFFV) promoter, phosphoglycerate kinase (PGK) promoter (Adra et al., Gene 60(1):65-74 (1987)), human beta actin promoter, polyubiquitin C gene (UBC) promoter, and CAG promoter (Nitoshi et al., Gene 108:193-199 (1991)).

[0110] In some embodiments, the vaccines and/or immunogenic compositions may further comprise one or more pharmaceutically acceptable carriers, adjuvents, additives, excipients, preservatives, or a combination thereof. A “pharmaceutically acceptable carrier or excipient” refers to a pharmaceutically acceptable material, composition, or vehicle that is involved in carrying or transporting a compound of interest from one tissue, organ, or portion of the body to another tissue, organ, or portion of the body. For example, the carrier or excipient may be a liquid or solid filler, diluent, excipient, solvent, or encapsulating material, or some combination thereof. Each component of the carrier or excipient must be “pharmaceutically acceptable,” in that it must be compatible with the other ingredients of the formulation. It also must be suitable for contact with any tissue, organ, or portion of the body that it may encounter, meaning that it must not carry a risk of toxicity, irritation, allergic response, immunogenicity, or any other complication that excessively outweighs its therapeutic benefits. Suitable excipients include water, saline, dextrose, glycerol, or the like and combinations thereof. In some embodiments, compositions comprising host cells as disclosed herein further comprise a suitable infusion media.

[0111] In some embodiments, the vaccine and/or immunogenic composition is formulated for intramuscular (IM) injection, intranasal (IN) instillation, intradermal injection, and/or scarification. In some embodiments, the vaccine and/or immunogenic composition is formulated for administration in a single dose. In some embodiments, the vaccine and/or immunogenic composition is formulated for administration in multiple doses. In some embodiments, the vaccine and/or immunogenic composition is formulated as a prime dose (series) and/or a booster dose. In some embodiments, the booster dose is in the same dosage as the prime dose. In some embodiments, the booster dose is in a lower dosage than the prime dose.

[0112] In some embodiments, COH04S1, a multi-antigenic poxvirus-vectored SARS-CoV-2 vaccine that co-expresses full-length S and N antigens, is provided. SEQ ID NO: 33 shows the full sequence of COH04S1. The DNA and protein sequences for the S antigen of COH04S1 are represented by SEQ ID NOs: 5 and 6, and the DNA and protein sequences for the N antigen of COH04S1 are represented by SEQ ID NOs: 7 and 8. Additional constructs (e.g., sMVA-S/N, sMVA-S, sMVA-N) are also disclosed in International Application Publication No. WO 2021/236550, which is hereby incorporated by reference as if fully disclosed herein. In some embodiments, the vaccines and/or immunogenic compositions comprise an sMVA vector, wherein the sMVA vector comprises or consists of a nucleotide sequence set forth in SEQ ID NO: 33, or a nucleotide sequence that is at least about 80% identical (e.g., at least about 80%, at least about 85%, at least about 90%, at least about 95%, at least about 96%, at least about 97%, at least about 98%, at least about 99%, or about 100% identical) to the nucleotide sequence set forth in SEQ ID NO: 33.

[0113] As demonstrated in the working examples, protection against SARS-CoV-2 by COH04S1 in animal models was achieved. For example, IM or IN vaccination of Syrian hamsters with COH04S1 stimulated robust Th1-biased S- and N-specific humoral immunity and cross-neutralizing antibodies (NAb) and protected against weight loss, lower respiratory tract infection, and lung injury following IN SARS-CoV-2 challenge. In addition, one- or two-dose vaccination of African green monkeys with COH04S1-induced robust antigen-specific binding antibodies, NAb, and Th1-biased T cells protected against both upper and lower respiratory tract infection following IN/intratracheal (IT) SARS-CoV-2 challenge, and triggered potent post-challenge anamnestic antiviral recall responses. These results demonstrate that COH04S1 stimulates protective immunity against SARS-CoV-2 in animal models through different vaccination routes and dose regimen, which complements ongoing investigation of this multi-antigen sMVA-vectored SARS-CoV-2 vaccine in clinical trials.

[0114] While NAb blocking S-mediated entry are considered the principal SARS-CoV-2 immune correlate of protection, humoral and cellular immune responses to multiple antigens have been implicated in the protection against SARS-CoV-2. Besides the S protein, the N protein is well recognized as a dominant target of antibody and T cell responses in SARS-CoV-2-infected individuals and therefore suggested as an additional immunogen to augment vaccine-mediated protective immunity. Its high conservation and universal cytoplasmic expression make the N protein an attractive complementary target antigen to elicit durable and broadly reactive T cells. Several recent studies highlight the benefits of N as a vaccine antigen in animal models.

[0115] Multi-antigenic SARS-CoV-2 vaccine candidates were previously constructed using a fully synthetic platform based on the well-characterized and clinically proven modified vaccinia Ankara (MVA) vector, which is marketed in the United States under the trade name Jynneos (Bavarian Nordic). Construction of SARS-CoV-2 vaccines is disclosed in International Application Publication No. WO 2021/236550, which is hereby incorporated by reference as if fully disclosed herein. MVA is a highly attenuated poxvirus vector that is widely used to develop vaccines for infectious diseases and cancer due to its excellent safety profile in animals and humans, versatile delivery and expression system, and ability to stimulate potent humoral and cellular immune responses to heterologous antigens. MVA has been used to develop vaccine candidates for preclinical testing in animal models of congenital cytomegalovirus disease while demonstrating vaccine efficacy in several clinical trials in solid tumor and stem cell transplant patients. Using the sMVA platform, sMVA vectors co-expressing full-length S and N antigen sequences were constructed and demonstrated potent immunogenicity in mice to stimulate SARS-CoV-2 antigen-specific humoral and cellular immune responses, including NAb. One of these sMVA constructs forms the basis of clinical vaccine candidate COH04S1, which has shown to be safe and immunogenic in a randomized, double-blind, placebo-controlled, single center Phase 1 trial in healthy adults (NCT04639466), and is currently evaluated in a randomized, double-blind, single center Phase 2 trial in hematology patients who have received cellular therapy (NCT04977024).

[0116] As demonstrated herein, COH04S1 stimulates protective immunity against SARS-CoV-2 in Syrian hamsters by IM and IN vaccination and in nonhuman primates (NHP) through two-dose (2D) and single-dose (1 D) vaccination regimen. These results complement the clinical evaluation of this multi-antigen sMVA-based SARS-CoV-2 vaccine.

[0117] Additionally, the emergence of several SARS-CoV-2 VOC with the capacity to evade S-specific NAb threatens the efficacy of approved COVID-19 vaccines, which primarily utilize a single antigen design based solely on the S protein. One way to avoid or minimize the risk for SARS-CoV-2 evasion of vaccine-induced immunity could be the stimulation of broadly functional humoral and cellular immunity beyond the induction of S-specific NAb. Particularly the stimulation of T cells by a combination of multiple immunodominant antigens could act as an additional countermeasure to confer long-term and broadly effective immunity against SARS-CoV-2 and its emerging VOC. Several recent studies indicate that SARS-CoV-2 VOC have the capacity to effectively escape humoral immunity, whereas they are unable to evade T cells elicited through natural infection and vaccination.

[0118] The multi-antigenic sMVA-vectored SARS-CoV-2 vaccine COH04S1 co-expressing full-length S and N antigens provides potent immunogenicity and protective efficacy in animal models. Using Syrian hamsters and NHP, it is shown that COH04S1 elicits robust antigen-specific humoral and cellular immune responses and protects against SARS-CoV-2 challenge through different vaccination routes and dose regimen. While these animal studies were not designed to assess the contribution of N in COH04S1-mediated protective immunity, these results warrant further evaluation of COH04S1 in ongoing and future clinical trials. COH04S1 represents a second-generation COVID-19 vaccine candidate that could be used alone or in combination with other existing vaccines in parenteral or mucosal prime-boost or single-shot vaccination strategies to augment vaccine-mediated protective immune responses against SARS-CoV-2.

[0119] Although several SARS-CoV-2 vaccines based on MVA have been developed and evaluated in animal models for immunogenicity and efficacy, there is currently no MVA-based SARS-CoV-2 vaccine approved for routine clinical use. COH04S1 and MVA-SARS-2-S, an MVA vector expressing S alone, are currently the only MVA-based SARS-CoV-2 vaccines that are clinically evaluated. In addition, COH04S1 and a recently developed adenovirus vector approach are currently the only clinically evaluated SARS-CoV-2 vaccines that utilize an antigen combination composed of S and N. These findings highlight the potential importance of COH04S1 as a second-generation multi-antigenic SARS-CoV-2 vaccine to contribute to the establishment of long-term protective immunity against COVID-19 disease. In addition, these findings highlight the potential of the sMVA platform and synthetic biology in poxvirus-vectored vaccine technology to rapidly generate protective and clinical-grade vaccine vectors for infectious disease prevention.

[0120] COH04S1 demonstrated potent immunogenicity in Syrian hamsters by IM and IN vaccination and in NHP by 2D and 1 D vaccination regimen to elicit robust SARS-CoV-2-specific humoral and cellular immune responses to both S and N antigens. This included high-titer S- and N-specific binding antibodies in addition to robust binding antibodies targeting the receptor binding domain (RBD), the primary target of NAb. Binding antibodies elicited by COH04S1 in hamsters as well as T cell responses induced by COH04S1 in NHP indicated Th1-biased immunity, which is thought to be the preferred antiviral adaptive immune response to avoid vaccine-associated enhanced respiratory disease. NAb elicited by COH04S1 in hamsters and NHP showed potent neutralizing activity against SARS-CoV-2 infectious virus, highlighting the potential of COH04S1 to induce antibody responses that are considered essential for protection against SARS-CoV-2. Notably, NAb titers stimulated by COH04S1 in NHP appeared similar to peak NAb titers stimulated in healthcare workers by two doses of the FDA-approved Pfizer/BioNTech mRNA vaccine. In addition, NAb stimulated by COH04S1 in hamsters showed neutralizing activity against PV variants based on several SARS-CoV-2 VOC, including Alpha, Beta, Gamma, and Delta variants, indicating the capacity of COH04S1 to stimulate cross-protective NAb against SARS-CoV-2 VOC.

[0121] Both IM and IN vaccination with COH04S1 provided potent efficacy to protect Syrian hamsters from progressive weight loss, lower respiratory tract infection, and lung injury upon IN challenge with SARS-CoV-2, highlighting the potential of COH04S1 to stimulate protective immunity against respiratory disease through parenteral and mucosal vaccination routes. In contrast, IM or IN vaccination of hamsters with COH04S1 appeared to provide only limited protection against upper respiratory tract infection following viral challenge, indicating that COH04S1-mediated parenteral or mucosal immune stimulation afforded only little protection in this small animal model at the site of viral inoculation, which may have been associated with the relatively aggressive sub-lethal viral challenge dose. While IM and IN vaccination with COH04S1 provided overall similar immunogenicity and protective efficacy against SARS-CoV-2 in hamsters, IN vaccination with COH04S1 appeared superior compared to IM vaccination to protect against initial minor weight loss at the early phase after SARS-CoV-2 challenge. On the other hand, hamsters vaccinated by IM route with COH04S1 were completely protected from lung injury following challenge, while hamsters vaccinated by IN route with COH04S1 showed minor lung pathology and inflammation at day 10 post-challenge, suggesting superior protection against viral- or immune-mediated lung pathology through IM vaccination compared to IN vaccination with COH04S1.

[0122] The immunogenicity and protective efficacy afforded by COH04S1 against SARS-CoV-2 in Syrian hamsters by IM and IN vaccination appears consistent with known properties of MVA-vectored vaccines. While MVA is well known to stimulate robust immunity by IM vaccination, MVA has also been shown to elicit potent immunity through IN vaccination strategies at mucosal surfaces. A recombinant MVA vector expressing the S protein of Middle East Respiratory Syndrome coronavirus (MERS-CoV), a close relative of SARS-CoV-2, has recently been shown to be safe and immunogenic following IM administration in a Phase 1 clinical trial. This MVA vaccine has also been shown to protect dromedary camels against MERS-CoV challenge by co-vaccination via IM and IN routes. In addition, several animal studies have shown that IN vaccination with MVA vaccines is a potent stimulator of bronchus-associated lymphoid tissue (BALT), a tertiary lymphoid tissue structure within the lung that is frequently present in children and adolescents and that serves as a general priming site for T cells. While the precise mechanism and levels of protection afforded by COH04S1 against SARS-CoV-2 in the Syrian hamster model by IM and IN vaccination remains unclear, especially at early phase after challenge, these findings support the use of COH04S1 to elicit SARS-CoV-2 protective immunity by mucosal vaccination.

[0123] In addition to the protection afforded by IM and IN vaccination with COH04S1 in hamsters, 2D and 1D vaccination with COH04S1 in NHP provided potent protection against lower and upper respiratory tract infection upon IN/IT challenge with SARS-CoV-2. These findings demonstrate protective efficacy of COH04S1 by different dose vaccination regimen in a larger animal model that is thought to be critical to assess preclinical vaccine efficacy. While 2D and 1D vaccination of NHP with COH04S1 stimulated similar S- and RBD-specific binding antibodies at the time of viral challenge, 2D vaccination appeared to be overall more effective than 1 D vaccination in stimulating humoral and cellular immune responses, including NAb. Despite these overall lower pre-challenge immune responses in 1D-vaccinated animals compared to 2D-vaccinated NHP, 1D and 2D vaccination of NHP with COH04S1 afforded similar protection against lower and upper respiratory tract infection following viral challenge, suggesting that a single shot with COH04S1 is sufficient to induce protective immunity to SARS-CoV-2. In addition, while 2D vaccination with COH04S1 appeared to elicit overall more potent pre-challenge responses than 1 D vaccination, overall more potent post-challenge anamnestic antiviral immune responses were observed in 1 D-vaccinated NHP compared to 2D-vaccinated NHP, suggesting that a single shot with COH04S1 is sufficient to effectively prime vaccine-mediated protective recall responses to SARS-CoV-2.

[0124] These results demonstrate that COH04S1 has the capacity to elicit potent and cross-reactive Th1-biased S- and N-specific humoral and cellular responses that protect hamsters and NHP from SARS-CoV-2 by different vaccination routes and dose regimen. This multi-antigen sMVA-vectored SARS-CoV-2 vaccine could be complementary to available vaccines to induce robust and long-lasting protective immunity against SARS-CoV-2 and its emerging VOC.

### Method of Treatment

[0125] In some aspects, provided are methods of preventing and/or treating a coronavirus infection, for example, SARS-CoV-2 infection, in a subject, comprising administering to the subject a prophylactically or therapeutically effective amount of the vaccine and/or immunogenic composition according to various embodiments of the present technology.

[0126] In some aspects, provided are methods of eliciting an immune response to a coronavirus, for example, SARS-CoV-2, in a subject comprising administering to the subject a prophylactically or therapeutically effective amount of the vaccine and/or immunogenic composition according to various embodiments of the present technology. In some embodiments, the subject is infected with SARS-CoV-2 or is at risk of being infected with SARS-CoV-2.

[0127] In some embodiments, the vaccines and/or immunogenic compositions are used for preventing or treating a coronavirus infection, for example, SARS-CoV-2 infection, caused by the ancestral Wuhan-Hu-1 reference strain or a VOC, including, but not limited to, B.1.1.7 (Alpha), B.1.351 (Beta), P.1 (Gamma), B.1.617.2 (Delta), B.1.621 (Mu), C.37 (Lambda), C.1.2, BA.1 (Omicron), BA.2 (Omicron), BA.2.12.1 (Omicron), BA.4 (Omicron), BA.5 (Omicron), BA.2.75 (Omicron), and newer Omicron variants such as BQ.1, BQ.1.1, and XBB among others that arise from time to time that are resistant to known antibody therapies such as Evushield and Bebtelovimab.

[0128] In some embodiments, the vaccine and/or immunogenic composition is administered to a subject by IM injection, IN injection, intradermal injection, instillation, and/or scarification. In some embodiments, the vaccine and/or immunogenic composition is administered to a subject in a single dose. In some embodiments, the vaccine and/or immunogenic composition is administered to a subject in a prime dose (series) followed by a booster dose. In some embodiments, the booster dose is in the same dosage as the prime dose. In some embodiments, the booster dose is in a lower dosage than the prime dose. In some embodiments, one or more additional doses are administered to the subject after administration of the prime (series) and booster doses. In some embodiments, the subject has previously received a different SARS-CoV-2 vaccine before administration of the vaccine and/or immunogenic composition disclosed herein.

[0129] The following examples are intended to illustrate various embodiments of the invention. As such, the specific embodiments discussed are not to be construed as limitations on the scope of the invention. It will be apparent to one skilled in the art that various equivalents, changes, and modifications may be made without departing from the scope of the invention, and it is understood that such equivalent embodiments are to be included herein. Further, all references cited in the disclosure are hereby incorporated by reference in their entirety, as if fully set forth herein.

### EXAMPLES

### Example 1: Materials and Methods

sMVA Vaccine Stocks

[0130] COH04S1 is a double-plaque purified virus isolate derived from the sMVA-N/S vector (NCBI Accession #MW036243), with N and S antigen sequences inserted into the MVA deletion sites 2 (Del2) and 3 (Del3), respectively. It was generated using the three-plasmid system of the sMVA platform and fowlpox virus TROVAC as a helper virus for virus reconstitution. COH04S1 co-expresses full-length, unmodified S and N antigen sequences based on the Wuhan-Hu-1 reference strain (NCBI Accession #NC_045512). Sequence identity of COH04S1 seed stock virus was assessed by PacBio long-read sequencing.

[0131] COH04S351 is a double-plaque purified virus isolate with analogous vaccine construction compared to the original COH04S1 vector and co-expresses modified S and N antigen sequences based on the B.1.351 Beta variant (Table 2).

[0132] COH04S529 is a non-plaque purified virus isolate with analogous vaccine construction compared to the original COH04S1 sMVA-N/S vaccine vector and co-expresses modified S and N antigen sequences based on the Omicron BA.1 variant (Table 2).

TABLE 2
S and N antigen-specific mutations in COH04S529
and COH04S351 vaccine sequences

| | | Substitutions/Deletions (Δ) to Wuhan-Hu-1 reference strain | |
|---|---|---|---|
| Vaccine | Strain | Spike (S) | Nucleocapsid (N) |
| COH04S529 | B.1.529 | A67V, Δ69-70 (HV), T95I, G142D, Δ143- | P13L, Δ31-33 |
| | | 145 (VYY), Δ211 (N), L212I, INS214 (EPE), | (ERS), R203K, |
| | | G339D, S371L, S373P, S375F, K417N, | G204R |
| | | N440K, G446S, S477N, T478K, E484A, | |
| | | Q493R, G496S, Q498R, N501Y, Y505H, | |
| | | T547K, D614G, H655Y, N679K, P681H, | |
| | | N764K, D796Y, N856K, Q954H, N969K, | |
| | | L981F | |
| COH04S351 | B.1.351 | L18F, D80A, D215G, Δ242-244, R246I, | T205I |
| | | N501Y, E484K, K417N, D614G, A701V | |

[0133] COH04S1, COH04S351, and COH04S529 were generated using the sMVA platform. Virus stocks of the vaccine vectors and sMVA control vector were produced using chicken embryo fibroblasts (CEF) and prepared by 36% sucrose cushion ultracentrifugation and virus resuspension in 1 mM Tris-HCl (pH 9). Virus stocks were stored at −80° C. and titrated on CEF by plaque immunostaining as described. Virus stocks were validated for antigen insertion and expression by PCR, sequencing, and immunoblot.

### Animals, Study Design, and Challenge

[0134] In-life portion of hamster and nonhuman primate (NHP) studies were carried out at Bioqual Inc. (Rockville, MD). Thirty female and male golden Syrian hamsters were randomly assigned to the groups, with 3 females and 3 males in each group. Hamsters were vaccinated by IM or IN route 4 weeks apart with 1×10⁸ plaque-forming units (PFU) of COH04S1 or sMVA vaccine stocks diluted in phosphate-buffered saline (PBS). Two weeks post-booster vaccination, animals were challenged intranasally (50 μl/nare) with 3×10⁴ PFU (or 1.99×10⁴ Median Tissue Culture Infectious Dose [TCID50]) of SARS-CoV-2 USA-WA1/2020 (BEI Resources; P4 animal challenge stock, NR-53780 lot no. 70038893). The stock was produced by infecting Vero E6-hACE2 cells (BEI Resources NR-53726) at low multiplicity of infection (MOI) with deposited passage 3 virus and resulted in a titer of 1.99×10⁶ TCID50/ml. Sequence identity was confirmed by next-generation sequencing. Body weight and temperature were recorded daily for 10 days. Hamsters were humanely euthanized for lung samples collection. A total of 24 African green monkeys (Chlorocebus aethiops; 20 females and 4 males) from St. Kitts weighing 3-6 kg were randomized by weight and sex to vaccine and control groups. For two-dose (2D) vaccination, NHP were either two times mock-vaccinated with PBS (N=3) at a 4-week interval or vaccinated twice, 4 weeks apart, with 2.5×10⁸ PFU of COH04S1 (N=6) or sMVA control vector (N=3) diluted in PBS. For single-dose (1 D) vaccination, NHP were either one time mock-vaccinated (N=3) with PBS or vaccinated once with 5×10⁸ PFU of COH04S1 (N=6) or sMVA control vector (N=3) diluted in PBS. At 6 weeks post-2D or post-1D vaccination, NHP were challenged with 1×10⁵ TCID50 of SARS-CoV-2 USA-WA1/2020 strain diluted in PBS via combined IT (1 ml)/IN (0.5 ml/nare) route. Necropsy was performed 7 days and 21 days following challenge and organs were collected for gross pathology and histopathology.

[0135] For the Omicron variant studies, 80 Syrian hamsters, 6 to 8 weeks old, were randomly assigned to the groups, with 5 females and 5 males in each challenge group. Hamsters were intramuscularly vaccinated 4 weeks apart with 1×10⁸ PFU of COH04S1, COH04S529, COH04S351, or sMVA virus stocks diluted in PBS or left unvaccinated. Blood samples were collected 2 weeks after the first vaccine dose and 2 weeks after the second dose. At this latter time point, animals were challenged intranasally (50 μl/nare) with 4.8×10⁴ TCID50 of SARS-CoV-2 BA.1 (BEI Resources NR-56486 LOT #: 70049695, titered by BEI Resources using Calu-3 cells) or with 5.16×10⁴ TCID50 of SARS-CoV-2 BA.2.12.1 (BEI Resources NR-56782 LOT #: 70052277, titered using Calu-3 cells). Body weight was recorded daily for 8 days. Hamsters were humanely euthanized for lung and turbinate samples collection at day 4 (n=5/group) and day 8 (n=5/group) post-challenge.

[0136] All animal studies were conducted in compliance with local, state, and federal regulations and were approved by Bioqual and City of Hope Institutional Animal Care and Use Committees (IACUC).

### ELISA Binding Antibody Detection

[0137] SARS-CoV-2-specific binding antibodies in hamsters and NHP samples were detected by indirect ELISA utilizing purified S, RBD, and N proteins (Sino Biological 40589-V08B1, 40592-V08H, 40588-V08B); Beta, Gamma, and Delta VOC-specific S proteins (Acro Biosystems SPN-C52Hk, SPN-C52Hg, SPN-C52He); or ancestral-specific, Beta-specific, Omicron BA.1-, BA.2-, and BA.4-specific S proteins (Sino Biological 40589-V08B1, 40588-V07E9, 40589-V08H26, 40589-V08H28, 40589-V08H32) and purified ancestral-specific, Beta-specific, Omicron BA.1-, BA.2-, and BA.4-specific N proteins (Sino Biological 40588-V08B, 40589-V08B7, 40588-V07E34, 40588-V07E35, 40588-V07E37). S and N mutations included in the antigens used for ELISA are indicated in Table 3. 96-well plates (Costar 3361) were coated with 100 ul/well of S, RBD, or N proteins at a concentration of 1 μg/ml in PBS and incubated overnight at 4° C. For binding antibody detection in hamster serum, plates were washed 5× with wash buffer (0.05% Tween-20/PBS), then blocked with 250 ul/well of blocking buffer (0.5% casein/154 mM NaCl/10 mM Tris-HCl [pH 7.6]) for 2 hours at room temperature. After washing, 3-fold diluted heat-inactivated serum in blocking buffer was added to the plates and incubated 2 hours at room temperature. After washing, anti-Hamster IgG HRP secondary antibodies measuring total IgG(H+L), IgG1, or IgG2/IgG3 (Southern Biotech 6061-05, 1940-05, 1935-05) were diluted 1:1000 in blocking buffer and added to the plates. After 1 hour incubation, plates were washed and developed with 1 Step TMB-Ultra (Thermo Fisher 34029). The reaction was stopped with 1 M H₂SO₄ and plates were immediately read on FilterMax F3 (Molecular Devices). For binding antibody detection in NHP serum, a similar protocol was used. Wash buffer was 0.1% Tween-20 in PBS, and blocking buffer was 1% casein/PBS for RBD- and N-antigen ELISA and 4% Normal Goat Serum/1% casein/PBS for S-antigen ELISA. For IgG quantification in NHP bronchoalveolar lavage (BAL) samples, 1% BSA/PBS was used as blocking and sample buffers. Goat anti-Monkey IgG (H+L) secondary antibody (Thermo Fisher Cat #PA1-84631) was diluted 1:10,000. Endpoint titers were calculated as the highest dilution to have an absorbance >0.100.

TABLE 3
Mutations in S and N antigens for ELISA testing

| Strain | VOC | Spike*^{#} | Nucleocapsid* | Notes |
|---|---|---|---|---|
| B.1.351 | Beta | L18F, D80A, D215G, Δ242-244 (LAL), R246L, | T205I | |
| | | K417N, E484K, N501Y, D614G, A701V | | |
| B.1.1.529 | Omicron | A67V, Δ69-70 (HV), T95I, G142D, Δ143-145 | P13L, Δ31-33 | |
| BA.1 | BA.1 | (VYY), Δ211 (N), L212I, INS214 (EPE), | (ERS), R203K, | |
| | | G339D, S371L, S373P, S375F, K417N, | G204R | |
| | | N440K, G446S, S477N, T478K, E484A, | | |
| | | Q493R, G496S, Q498R, N501Y, Y505H, | | |
| | | T547K, D614G, H655Y, N679K, P681H, | | |
| | | N764K, D796Y, (F817P), N856K, (A892P), | | |
| | | (A899P), (A942P), Q954H, N969K, L981F, | | |
| | | (K986P), (V987P) | | |
| B.1.1.529 | Omicron | T19I, L24S, Δ25-27 (PPA), G142D, V213G, | P13L, Δ31-33 | BA.2, |
| BA.2 | BA.2 | G339D, S371F, S373P, S375F, T376A, | (ERS), R203K, | BA.5, |
| | | D405N, R408S, K417N, N440K, S477N, | G204R, S413R | BA.2.12.1, |
| | | T478K, E484A, Q493R, Q498R, N501Y, | | BA.2.75 |
| | | Y505H, D614G, H655Y, N679K, P681H, | | share the |
| | | N764K, D796Y, (F817P), (A892P), (A899P), | | same N |
| | | (A942P), Q954H, N969K, (K986P), (V987P) | | mutations |
| B.1.1.529 | Omicron | T19I, L24S, Δ25-27 (PPA), Δ69-70 (HV), | P13L, Δ31-33 | BA.4 and |
| BA.4 | BA.4 | G142D, V213G, G339D, S371F, S373P, | (ERS), P151S, | BA.5 |
| | | S375F, T376A, D405N, R408S, K417N, | R203K, | share the |
| | | N440K, L452R, S477N, T478K, E484A, | G204R, S413R | same S |
| | | F486V, Q498R, N501Y, Y505H, D614G, | | mutations |
| | | H655Y, N679K, P681H, N764K, D796Y, | | |
| | | (F817P), (A892P), (A899P), (A942P), Q954H, | | |
| | | N969K, (K986P), (V987P) | | |

*Substitutions/Deletions (Δ)/Insertions (INS) to Wuhan-Hu-1 reference strain
^{#}in parenthesis mutations added to stabilize the trimer in pre-fusion conformation

### Neutralization Assay

[0138] NAb were measured by plaque reduction neutralization titer (PRNT) assay using SARS-CoV-2 USA-WA1/2020 strain (Lot #080420-900) or 1BA.1 variant. Ancestral stock was generated using Vero E6 cells infected with seed stock virus obtained from Kenneth Plante at UTMB (lot #TVP 23156). BA.1 stock (Bioqual Lot #122121-700) was originally received from Emory (B.1.1.529 PP3P1 hCoV19/EHC_C19_2811C 12/9/2021) and expanded in Calu-3 cells. Vero E6 cells (ATCC, CRL-1586) were seeded in 24-well plates at 175,000 cells/well in DMEM/10% FBS/Gentamicin. Serial 3-fold serum dilutions were incubated in 96-well plates with 30 PFU of SARS-CoV-2 USA-WA1/2020 strain (BEI Resources NR-53780 lot no. 70038893) for 1 hour at 37° C. The serum/virus mixture was transferred to Vero E6 cells and incubated for 1 hour at 37° C. After that, 1 ml of 0.5% methylcellulose media was added to each well and plates were incubated at 37° C. for 3 days. Plates were washed, and cells were fixed with methanol. Crystal violet staining was performed, and plaques were recorded. IC50 titers were calculated as the serum dilution that gave a 50% reduction in viral plaques in comparison to control wells. Serum samples collected from City of Hope healthcare workers (N=14) at day 60 post-Pfizer/BioNTech BNT162b2 mRNA vaccination were part of an IRB-approved observational study to establish durability of immunogenic properties of emergency use authorization (EUA) vaccines against COVID-19 (IRB20720).

### Pseudovirus Production

[0139] SARS-CoV-2 pseudovirus was produced using a plasmid lentiviral system based on pALD-gag-pol, pALD-rev, and pALD-GFP (Aldevron). Plasmid pALD-GFP was modified to express Firefly luciferase (pALD-Fluc). Plasmid pCMV3-S(Sino Biological VG40589-UT) was utilized and modified to express SARS-CoV-2 Wuhan-Hu-1 S with D614G modification. Customized gene sequences cloned into pTwist-CMV-BetaGlobin (Twist Biosciences) were used to express SARS-CoV-2 VOC-specific S variants (Table 4).

TABLE 4
SARS-CoV-2 VOC-specific S mutations included in pseudoviral particles

| | CDC | |
|---|---|---|
| VOC | Classification | Substitutions/Deletions (Δ) |
| B.1.1.7 | Alpha | Δ69/70, Δ144, N501Y, A570D, D614G, P681H, |
| | | T716I, S982A, D1118H |
| B.1351 | Beta | L18F, D80A, D215G, Δ242-244, R246I, K417N, |
| | | E484K, N501Y, D614G, A701V |
| P.1 | Gamma | L18F, T20N, P26S, D138Y, R190S, K417T, E484K, |
| | | N501Y, D614G, H655Y, T1027I, V1176F |
| B.1.617.2 | Delta | T19R, G142D, Δ156-157, R158G, A222V, L452R, |
| | | T478K, D614G, P681R, D950N |

[0140] All S antigen were expressed with C-terminal 19 amino acids deletion. A transfection mixture was prepared with 1 ml OptiMEM that contained 30 μl of TransIT-LT1 transfection reagent (Mirus MIR2300) and 6 μg pALD-Fluc, 6 μg pALD-gag-pol, 2.4 μg pALD-rev, and 6.6 μg S expression plasmid. The transfection mix was added to 5×10⁶ HEK293T/17 cells (ATCC CRL11268) seeded the day before in 10 cm dishes and the cells were incubated for 72 hours at 37° C. Supernatant-containing pseudovirus was harvested and frozen in aliquots at −80° C. Lentivirus was titrated using the Lenti-X™ p24 Rapid Titer Kit (Takara) according to the manufacturer's instructions.

### Pseudovirus Neutralization Assay

[0141] SARS-CoV-2 pseudoviruses were titrated in vitro to calculate the virus stock amount that equals 100,000-200,000 relative luciferase units. Flat-bottom 96-well plates were coated with 100 μL poly-L-lysine (0.01%). Serial 2-fold serum dilutions starting from 1:20 were prepared in 50 μL media and added to the plates in triplicates, followed by 50 μL of pseudovirus. Plates were incubated overnight at 4° C. The following day, 10,000 HEK293T-ACE2 cells were added to each well in the presence of 3 μg/ml polybrene and plates were incubated at 37° C. After 48 hours of incubation, luciferase lysis buffer (Promega E1531) was added and luminescence was quantified using SpectraMax L (Molecular Devices, 100 μL One-Glo (Promega E6110) luciferin/well, 10 seconds integration time). For each plate, positive (pseudovirus only) and negative (cells only) controls were added. The neutralization titer for each dilution was calculated as follows: NT=[1−(mean luminescence with immune sera/mean luminescence without immune sera)]×100. The titers that gave 50% neutralization (NT50) were calculated by determining the linear slope of the graph plotting NT versus serum dilution by using the next higher and lower NT using Microsoft Excel (v2019).

### ELISPOT T Cell Detection

[0142] Peripheral blood mononuclear cells (PBMC) were isolated from fresh blood using Ficoll and counted using Luna-FL cell counter (Logos Biosystems). Pre-immune samples were evaluated using Human IFNγ/IL-4 Double-Color FluoroSpot (ImmunoSpot); however, this kit only allowed assessment of NHP IFNγ but did not detect NHP IL-4. The remaining time points were evaluated using Monkey IFNγ/IL-4 FluoroSpot FLEX kit and Monkey IL-2 FluoroSpot FLEX kit (Mabtech, X-21A16B and X-22B) following manufacturer instructions. Briefly, 200,000 cells/well in CTL-test serum free media (ImmunoSpot CTLT-010) were added to duplicate wells and stimulated with peptide pools (15 mers, 11 aa overlap, >70% purity). Spike peptide library (GenScript) consisted of 316 peptides and was divided into 4 sub-pools spanning the S1 and S2 domains (181=1-86; 1S2=87-168; 2S1=169-242; 2S2=243-316; peptides 173 and 304-309 were not successfully synthesized and therefore were excluded from the pools). Nucleocapsid (GenScript) and Membrane (in-house synthesized) libraries consisted of 102 and 53 peptides, respectively. Each peptide pool (2 μg/ml) and αCD28 (0.1 μg/ml, Mabtech) were added to the cells and plates were incubated for 48 hours at 37° C. Control cells (25,000/well) were stimulated with PHA (10 μg/ml). After incubation, plates were washed and primary and secondary antibodies were added according to the manufacturer's protocol. Fluorescent spots were acquired using CTL S6 Fluorocore (ImmunoSpot). For each sample, spots in unstimulated DMSO-only control wells were subtracted from spots in stimulated wells. Total spike response was calculated as the sum of the response to each spike sub-pool.

Quantification of SARS-CoV-2 gRNA (Genomic RNA)

[0143] SARS-CoV-2 gRNA copies per ml nasal wash, BAL fluid or swab, or per gram of tissue were quantified by qRT-PCR assay (Bioqual, SOP BV-034) using primer/probe sequences binding to a conserved region of SARS-CoV-2 N gene. Viral RNA was isolated from BAL fluid or swabs using the Qiagen MinElute virus spin kit (57704). For tissues, viral RNA was extracted with RNA-STAT 60 (Tel-test B)/chloroform, precipitated and resuspended in RNAse-free water. The control RNA was prepared to contain 10⁶ to 10⁷ copies per 3 μl. Eight 10-fold serial dilutions of control RNA were prepared using RNAse-free water. Duplicate samples of each dilution were prepared as described. To generate a control for the amplification, RNA was isolated from SARS-CoV-2 virus stocks. RNA copies were determined from an O.D. reading at 260, using the estimate that 1.0 OD at A260 equals 40 μg/ml of RNA. A final dilution of 10⁸ copies per 3 μl was then divided into single-use aliquots of 10 μl. These were stored at −80° C. until needed. SensiFAST Probe Lo-ROX One-Step Kit (Bioline BIO-78005) was used following manufacturer instructions. For the master mix preparation, 2.5 ml of 2× buffer containing Taq-polymerase, obtained from the TaqMan RT-PCR kit (Bioline BIO-78005), was added to a 15 ml tube. From the kit, 50 μl of the RT and 100 μl of RNAse inhibitor were also added. The primer pair at 2 μM concentration was then added in a volume of 1.5 ml. Lastly, 0.5 ml of water and 350 μl of the probe at a concentration of 2 μM were added and the tube vortexed. For the reactions, 45 μl of the master mix and 5 μl of the sample RNA were added to the wells of a 96-well plate. All samples were tested in triplicate. The plates were sealed with a plastic sheet. For amplification, the plate was placed in an Applied Biosystems 7500 Sequence detector and amplified using the following program: 48° C. for 30 minutes, 95° C. for 10 minutes followed by 40 cycles of 95° C. for 15 seconds, and 55° C. for 1 minute. The number of copies of RNA per ml was calculated by extrapolation from the standard curve and multiplying by the reciprocal of 0.2 ml extraction volume. This gave a practical range of 50 to 5×10⁸ RNA copies per swabs or per ml BAL fluid. Primers/probe sequences: 5′-GAC CCC AAA ATC AGC GAA AT-3′ (SEQ ID NO: 34); 5′-TCT GGT TAC TGC CAG TTG AAT CTG-3′ (SEQ ID NO: 35); and 5′-FAM-ACC CCG CAT TAC GTT TGG TGG ACC-BHQ1-3′ (SEQ ID NO: 36).

Quantification of SARS-CoV-2 sgRNA (Subgenomic RNA)

[0144] SARS-CoV-2 sgRNA copies were assessed through quantification of N gene mRNA by qRT-PCR using primer/probes specifically designed to amplify and bind to a region of the N gene mRNA that is not packaged into virions. Briefly, SARS-CoV-2 RNA was extracted from tissues using TRIzol, precipitated and resuspended in RNAse-free water. The signal was compared to a known standard curve of plasmid containing a cDNA copy of the N gene mRNA target region to give copies per ml. For amplification, the plate was placed in an Applied Biosystems 7500 Sequence detector and amplified using the following program: 48° C. for 30 minutes, 95° C. for 10 minutes followed by 40 cycles of 95° C. for 15 seconds, and 55° C. for 1 minute. The number of copies of RNA per ml was calculated by extrapolation from the standard curve and multiplying by the reciprocal of 0.2 ml extraction volume. This gave a practical range of 50 to 5×10⁷ RNA copies per swab or ml BAL fluid. Primers/probe sequences: 5′-CGA TCT CTT GTA GAT CTG TTC TC-3′ (SEQ ID NO: 37); 5′-GGT GAA CCA AGA CGC AGT AT-3′ (SEQ ID NO: 38); 5′-FAM-TAA CCA GAA TGG AGA ACG CAG TGG G-BHQ-3′ (SEQ ID NO: 39).

### Quantification of SARS-CoV-2 Infectious Virus Titers

[0145] Vero TMPRSS2 cells (Vaccine Research Center-NIAID) were plated at 25,000 cells/well in DMEM/10% FBS/Gentamicin. Ten-fold dilutions of the sample starting from 20 ul of material were added to the cells in quadruplicate and incubated at 37° C. for 4 days. The cell monolayers were visually inspected, and presence of CPE noted. TCID50 values were calculated using the Read-Muench formula.

### Histopathology

[0146] Histopathological evaluation of hamsters and NHP lung sections were performed by Experimental Pathology Laboratories, Inc. (Sterling, VA), and Charles River (Wilmington, MA), respectively. At necropsy, organs were collected and placed in 10% neutral buffered formalin for histopathologic analysis. Tissues were processed through to paraffin blocks, sectioned once at approximately 5 microns thickness, and stained with H&E. Board-certified pathologists were blinded to the vaccine groups and mock controls were used as a comparator. Histopathological findings were assigned a severity score between 1 (minimal) and 5 (severe) (Table 5).

TABLE 5
Scoring parameters used to evaluate hamster lung histopathology

| Grade | Severity | Findings |
|---|---|---|
| 1 | Minimal | Histopathologic change ranging from inconspicuous to barely |
| | | noticeable but so minor, small, or infrequent as to warrant no more |
| | | than the least assignable grade. For multifocal or diffusely |
| | | distributed lesions, this grade was used for processes where less |
| | | than approximately 10% of the tissue in an average high-power field |
| | | was involved. For focal or diffuse hyperplastic/hypoplastic/atrophic |
| | | lesions, this grade was used when the affected structure or tissue |
| | | had undergone a less than approximately 10% increase or |
| | | decrease in volume. |
| 2 | Mild | Histopathologic change that is a noticeable but not a prominent |
| | | feature of the tissue. For multifocal or diffusely distributed lesions, |
| | | this grade was used for processes where between approximately |
| | | 10% and 25% of the tissue in an average high-power field was |
| | | involved. For focal or diffuse hyperplastic/hypoplastic/atrophic |
| | | lesions, this grade was used when the affected structure or tissue |
| | | had undergone between an approximately 10% to 25% increase or |
| | | decrease in volume. |
| 3 | Moderate | Histopathologic change that is a prominent but not a dominant |
| | | feature of the tissue. For multifocal or diffusely distributed lesions, |
| | | this grade was used for processes where between approximately |
| | | 25% and 50% of the tissue in an average high-power field was |
| | | involved. For focal or diffuse hyperplastic/hypoplastic/atrophic |
| | | lesions, this grade was used when the affected structure or tissue |
| | | had undergone between an approximately 25% to 50% increase or |
| | | decrease in volume. |
| 4 | Marked | Histopathologic change that is a dominant but not an overwhelming |
| | | feature of the tissue. For multifocal or diffusely distributed lesions, |
| | | this grade was used for processes where between approximately |
| | | 50% and 95% of the tissue in an average high-power field was |
| | | involved. For focal or diffuse hyperplastic/hypoplastic/atrophic |
| | | lesions, this grade was used when the affected structure or tissue |
| | | had undergone between an approximately 50% to 95% increase or |
| | | decrease in volume. |
| 5 | Severe | Histopathologic change that is an overwhelming feature of the |
| | | tissue. For multifocal or diffusely distributed lesions, this grade was |
| | | used for processes where greater than approximately 95% of the |
| | | tissue in an average high-power field was involved. For focal or |
| | | diffuse hyperplastic/hypoplastic/atrophic lesions, this grade was |
| | | used when the affected structure or tissue had undergone a greater |
| | | than approximately 95% increase or decrease in volume. |

### Statistical Analyses

[0147] Statistical analyses were performed using Prism 8 (GraphPad, v8.3.0). One-way ANOVA with Holm-Sidak's multiple comparison test, two-way ANOVA with Tukey's or Dunn's multiple comparison test, the Kruskal-Wallis test followed by Dunn's multiple comparison test, and Spearman correlation analysis were used. All tests were two-sided. The test applied for each analysis and the significance level is indicated in each figure legend. Prism 8 was used to derive correlation matrices.

### Example 2: COH04S1 Induces Robust Th1-Biased S and N Antigen-Specific Antibodies and Cross-NAb Responses Against SARS-CoV-2 in Hamsters Through IM and IN Vaccination

[0148] Syrian hamsters are widely used to evaluate vaccine protection against SARS-CoV-2 in a small animal model that mimics moderate-to-severe COVID-19 disease. Using this animal model, the efficacy of COH04S1 (FIG. 1A) to protect against SARS-CoV-2 challenge by either IM or IN vaccination was determined to assess vaccine protection via parenteral or mucosal immune stimulation. Hamsters were vaccinated twice in a 4-week interval with 1×10⁸ PFU of COH04S1 by IM or IN route, referred to as COH04S1-IM or COH04S1-IN, respectively (FIG. 1B). Unvaccinated animals and hamsters vaccinated by IM or IN route with empty sMVA vector were used as controls. COH04S1-IM and COH04S1-IN stimulated robust and comparable binding antibodies to both the S and N antigens, including antibodies to the RBD, the primary target of NAb. Binding antibodies to S, RBD, and N were detected at high levels in both the COH04S1-IM and COH04S1-IN vaccine groups after the first vaccination and boosted after the second vaccination (FIGS. 1C-1D, 2A-2N), whereby a particularly strong booster effect was observed for RBD-specific antibodies. Antigen-specific binding antibodies stimulated by COH04S1-IM and COH04S1-IN in hamsters were mainly composed of IgG2/3 isotypes and only to a minor extent of IgG1 isotype (FIGS. 1E, 2A-2N), indicating Th1-biased immune responses.

[0149] PRNT assay measuring neutralizing activity against SARS-CoV-2 infectious virus (USA-WA1/2020) demonstrated that potent and comparable NAb titers were stimulated by COH04S1-IM and COH04S1-IN after the booster vaccinations (FIGS. 1F-1G). Furthermore, pooled post-boost immune sera from COH04S1-IM- and COH04S1-IN-vaccinated animals demonstrated potent cross-reactive neutralizing activity against SARS-CoV-2 pseudoviruses (pv) with D614G S mutation or multiple S modifications based on several SARS-CoV-2 VOC (FIGS. 1H, 2A-2N; Table 3), including Alpha (B.1.1.7), Beta (B.1.351), Gamma (P.1), and Delta variants (B.1.617.2). Notably, while NAb titers measured with Alpha, Beta, and Gamma PV variants were generally similar to those determined with D614G PV, NAb titers measured with the Delta-matched PV variant were 2- to 8-fold reduced compared to those determined with D614G PV. In addition, NAb titers measured in COH04S1-IM immune sera using the different PV variants appeared lower overall than those measured in COH04S1-IN immune sera. These results demonstrate that IM and IN vaccination of Syrian hamsters with COH04S1 elicits robust Th1-biased S and N antigen-specific binding antibodies as well as potent NAb responses with cross-reactivity to prevent PV infection by several SARS-CoV-2 VOC.

### Example 3: IM and IN Vaccination with COH04S1 Protect Hamsters from Progressive Weight Loss, Lower Respiratory Tract Infection, and Lung Pathology Following SARS-CoV-2 Challenge

[0150] Two weeks after the booster vaccination, hamsters were challenged intranasally with 6×10⁴ PFU of SARS-CoV-2 reference strain USA-WA1/2020 and body weight changes were measured over a period of 10 days. While control animals showed rapid body weight loss post-challenge, hamsters vaccinated by IM or IN route with COH04S1 were protected from severe weight loss following challenge (FIGS. 3A-3B). Control animals showed rapid body weight loss for 6-7 days post-challenge, reaching maximum weight loss between 10% and 20%. In contrast, COH04S1-IM- and COH04S1-IN-vaccinated animals showed no or only very minor body weight decline post-challenge, with maximum body weight loss below 4% for all animals at any time point during the entire 10-day observation period (FIGS. 3A-3B). Notably, while minor weight loss was observed for COH04S1-IM-vaccinated animals at 1-2 days post-challenge, COH04S1-IN-vaccinated animals did not show body weight decline at these early time points post-challenge (FIG. 3A), suggesting improved protection from weight loss by COH04S1 through IN vaccination compared to IM vaccination at an early phase post-challenge.

[0151] At day 10 post-challenge, hamsters were euthanized for viral load assessment and histopathology analysis. Viral load was measured in the lungs and nasal turbinates/wash by quantification of SARS-CoV-2 genomic RNA (gRNA) and subgenomic RNA (sgRNA) to gauge the magnitude of total and replicating virus at lower and upper respiratory tracts. Compared to lung viral loads of control animals, markedly reduced gRNA and sgRNA copies were observed in the lungs of COH04S1-IM- and COH04S1-IN-vaccinated animals (FIGS. 3C-3D), demonstrating potent vaccine protection against lower respiratory tract infection through IM and IN vaccination. SARS-CoV-2 gRNA copies in the lungs of COH04S1-IM- and COH04S1-IN-vaccinated animals were more than 3 to 4 orders of magnitude lower than in the lungs of control animals. Furthermore, while 103-10⁶ sgRNA copies were detected in the lungs of control animals, sgRNA was undetectable in the lungs of COH04S1-IM- and COH04S1-IN-vaccinated animals, indicating complete absence of replicating virus in lung tissue of vaccinated hamsters. Compared to nasal viral loads of controls, gRNA and sgRNA viral loads in nasal turbinates and wash of COH04S1-IM- and COH04S1-IN-vaccinated animals appeared only marginally reduced, indicating limited vaccine impact on upper respiratory tract infection by COH04S1 independent of vaccination route (FIGS. 4A-4D).

[0152] Histopathological findings in hematoxylin/eosin-stained lung sections of euthanized animals were assessed by a board-certified pathologist and scored in a blind manner on a scale from 1 to 5 based on the severity and diffusion of the lesions (Table 5).

[0153] Control animals demonstrated compromised lung structure characterized by moderate bronchioloalveolar hyperplasia with consolidation of lung tissue, minimal to mild mononuclear or mixed cell inflammation, and syncytial formation (FIGS. 3E-3H). In contrast, COH04S1-IM-vaccinated animals did not show lung pathology of any type and grade in 6/6 hamsters, demonstrating potent vaccine protection against SARS-CoV-2-mediated lung injury in hamsters by IM vaccination with COH04S1. While COH04S1-IN-vaccinated animals presented no severe histopathological findings and significantly reduced lung pathology compared to controls, COH04S1-IN-vaccinated hamsters consistently showed a mild form of bronchioloalveolar hyperplasia and grade 1 interstitial inflammation in a subset of animals, indicating that IN vaccination with COH04S1 mediated potent but incomplete vaccine protection against SARS-CoV-2-mediated lung damage in this model (FIGS. 3E-3H).

[0154] Correlative analysis of pre-challenge immunity and post-challenge outcome revealed that any of the evaluated COH04S1-induced responses, including S-, RBD-, and N-specific antibodies and NAb, correlated with protection from weight loss, lung infection, and lung pathology (FIGS. 5A-5B), confirming that the observed protection was vaccine-mediated. These results in sum demonstrate that hamsters vaccinated by IM and IN route with COH04S1 are protected from progressive weight loss, lower respiratory tract infection, and severe lung pathology following SARS-CoV-2 challenge.

### Example 4: 2D and 1 D Vaccination of NHP with COH04S1 Stimulates Robust Antigen-Specific Binding Antibodies, NAb Responses, and Antigen-Specific IFNγ- and IL-2-Expressing T Cells

[0155] NHP represents a mild COVID-19 disease model that is widely used to bolster preclinical SARS-CoV-2 vaccine efficacy against upper and lower respiratory tract infection in an animal species that is more closely related to humans. The African green monkey NHP model was used to assess COH04S1 vaccine protection against SARS-CoV-2 by 2D and 1 D vaccination regimen, referred to as COH04S1-2D and COH04S1-1 D, respectively. For 2D vaccination, NHP were vaccinated twice in a 4-week interval with 2.5×10⁸ PFU of COH04S1. For 1D vaccination, monkeys were vaccinated once with 5×10⁸ PFU of COH04S1 (FIG. 6A). As controls, monkeys were either mock-vaccinated or vaccinated with empty sMVA vector via the same schedule and dose vaccination regimen. Robust serum binding antibodies to S, RBD, and N were stimulated in NHP by both COH04S1-2D and COH04S1-1 D, whereas binding antibodies in the 2D vaccine group were strongly boosted after the second dose. At the time of challenge, S- and RBD-specific antibody titers measured in the 2D and 1 D vaccine groups were comparable (FIGS. 6B-6D, 7A-7J), while N-specific titers appeared higher in the 2D vaccine group than in the 1 D vaccine group. Notably, similar S-specific antibody titers were measured in 2D- and 1 D-vaccinated NHP by S antigens based on the original Wuhan-Hu-1 reference strain and various VOC (Beta, Gamma, and Delta), whereas binding antibodies titers measured with VOC-specific S antigens tended to be lower than those measured with the Wuhan-Hu-1 S antigen (FIGS. 6E, 7A-7J). Antigen-specific binding antibodies of the IgG type were also measured in lung BAL samples 2 weeks pre-challenge. BAL IgG binding antibodies to S, RBD, and N were detected in both COH04S1-2D- and COH04S1-1D-vaccinated NHP, although BAL IgG antibody titers measured at this time point pre-challenge were higher in the 2D vaccine group than in the 1 D vaccine group (FIGS. 6F, 7A-7J).

[0156] NAb measurements based on PRNT assay revealed that both COH04S1-2D and COH04S1-1 D elicited NAb responses with efficacy to neutralize SARS-CoV-2 infectious virus (USA-WA1/2020). NAb responses measured in COH04S1-2D-vaccinated animals were boosted after the second dose and exceeded those measured in COH04S1-1 D-vaccinated NHP at the time of challenge (FIG. 6G). Notably, NAb measured by PRNT assay in COH04S1-2D- and COH04S1-1 D-vaccinated NHP were within the range of peak titers measured post-second dose in a cohort of healthcare workers that received the FDA-approved BNT162b2 mRNA vaccine from Pfizer/BioNTech.

[0157] At 2 weeks pre-challenge, SARS-CoV-2 antigen-specific T cell responses in COH04S1-vaccinated NHP were also assessed. Both 2D and 1D vaccination with COH04S1 stimulated robust IFNγ- and IL-2-expressing S and N antigen-specific T cells, whereas no or only very low levels of IL-4-expressing S- and N-specific T cells were observed in COH04S1-2D- or COH04S1-1D-vaccinated animals, consistent with Th1-biased immunity (FIGS. 6H-6I, 8A-8F). S-specific T cells were generally detected at a higher frequency than N-specific T cells in both the COH04S1-2D and COH04S1-1D vaccine groups. In addition, S-specific T cells measured at this time point pre-challenge were detected at a higher frequency in 2D-vaccinated NHP than in 1 D-vaccinated NHP. These results demonstrate that COH04S1 elicits robust antigen-specific binding antibodies, NAb, and antigen-specific IFNγ- and IL-2-expressing T cells in NHP through 2D and 1D vaccination regimen.

### Example 5: 2D and 1 D Vaccination with COH04S1 Protects NHP from Lower and Upper Respiratory Tract Infection Following SARS-CoV-2 Challenge

[0158] Six weeks after 2D or 1D vaccination with COH04S1, vaccinated NHP were challenged by IN/IT route with 1×10⁵ PFU of SARS-CoV-2 (USA-WA1/2020). SARS-CoV-2 viral loads in lower and upper respiratory tracts were assessed at several time points for 21 days post-challenge in BAL and nasal/oral swabs by quantification of gRNA and sgRNA and infectious virus titers (FIGS. 9A-9I, 10A-10I, 11A-11F). Progressively declining viral loads were overall measured over the 21 days post-challenge observation period in BAL and nasal/oral swabs of both COH04S1-vaccinated NHP and control animals. Compared to BAL viral loads of control animals, markedly reduced gRNA and sgRNA copies and infectious virus titers were measured in BAL of COH04S1-2D- and COH04S1-1 D-vaccinated NHP at almost all time points post-challenge (FIGS. 9A-9B, 9D-9E, 9G-9H), indicating a potent vaccine impact on lower respiratory tract infection. Notably, BAL gRNA and sgRNA copies and infectious titers measured in COH04S1-2D- and COH04S1-1 D-vaccinated NHP at day 2 immediately after challenge were on average 2 to 3 orders of magnitude lower than those measured in controls, confirming rapid vaccine efficacy. The marked reduction in BAL viral loads of COH04S1-vaccinated NHP compared to controls was confirmed when combining viral loads measured at all time points post-challenge by area under the curve (AUC; FIGS. 9C, 9F, 9I).

[0159] Similar to viral loads in BAL of COH04S1-vaccinated NHP, gRNA and sgRNA copies and infectious virus titers measured at the first 10 days post-challenge in nasal swabs of COH04S1-2D- or COH04S1-1 D-vaccinated NHP were consistently lower than those of control animals, demonstrating vaccine efficacy to prevent upper respiratory tract infection (FIGS. 10A-10I). In addition, gRNA and sgRNA in oral swabs of COH04S1-vaccinated NHP tended to be consistently lower than those in oral swabs of control animals (FIGS. 11A-11F). Notably, nasal and oral swab gRNA and sgRNA copies and nasal swab infectious titers measured at 1-3 days immediately after challenge in COH04S1-vaccinated NHP were significantly reduced compared to those of controls, indicating immediate vaccine protection. Overall reduced nasal and oral swab viral loads in COH04S1-vaccinated NHP compared to control animals were confirmed when evaluating the nasal and oral swab viral loads over time by AUC (FIGS. 10C, 10F, 10I, 11A-11F). No significant differences in viral loads were observed between COH04S1-2D and COH04S1-1 D-vaccinated animals, indicating similar protection against lower and upper respiratory tract infection by COH04S1 through 2D and 1 D vaccination. Viral loads measured at day 7 or day 21 post-challenge in lung tissue and several other organs of necropsied animals did not indicate evident differences between COH04S1-vaccinated NHP and control animals (FIGS. 12A-12L). While gRNA and sgRNA copies measured at day 7 post-challenge in lung samples of COH04S1-2D- and COH04S1-1 D-vaccinated NHP appeared reduced compared to those measured in lung samples of controls, these results were inconclusive due to low or undetectable gRNA and sgRNA levels in lung samples of the 1D mock-vaccinated control monkey (FIGS. 12A-12L). Histopathological findings assessed by a board-certified pathologist in a blind manner at days 7 and 21 post-challenge were generally only minor and comparable between COH04S1 vaccine and control groups, and no increase in inflammation was observed for COH04S1-vaccinated NHP compared to control animals (Table 6).

TABLE 6
NHP vaccine groups, necropsy schedule, and gross pathological findings

| | | Weight | | Nx | Nx | |
|---|---|---|---|---|---|---|
| Group | Study | (kg) | Sex | day +7 | day +21 | Gross pathology findings at Nx |
| Mock | 2D | 4.76 | F | | X | All lobes normal |
| | | 3.02 | F | X | | Right caudal lung, remaining lobes normal. Overall |
| | | | | | | hemorrhaging |
| | | 3.78 | F | | X | Left and right caudal lung, remaining lobes normal |
| | 1D | 3.56 | F | X | | Pathology and congestion in all lobes |
| | | 3.45 | F | | X | Pathology and congestion in all lobes |
| | | 6.79 | M | | X | Left and right caudal lung, remaining lobes normal |
| sMVA | 2D | 4.03 | F | X | | Right caudal lung, remaining lobes normal |
| | | 3.31 | F | X | | Gross congestion, possibly due to BALs. Lobes normal |
| | | 3.63 | F | | X | Right caudal lung, remaining lobes normal |
| | 1D | 3.41 | F | X | | Gross congestion, possibly due to BALs. Lobes normal |
| | | 3.73 | F | X | | Gross congestion, possibly due to BALs. Lobes normal |
| | | 6.05 | M | | X | All lobes normal |
| COH04S1 | 2D | 4.02 | F | X | | Gross congestion, possibly due to BALs. Lobes normal |
| | | 2.91 | F | X | | Right caudal lung, remaining lobes normal |
| | | 3.69 | F | | X | Gross congestion, possibly due to BALs. Lobes normal |
| | | 3.68 | F | | X | Right caudal lung, remaining lobes normal |
| | | 3.37 | F | X | | Right caudal lung, remaining lobes normal |
| | | 7.23 | M | | X | Right caudal lung, remaining lobes normal |
| | 1D | 3.79 | F | X | | Gross congestion, possibly due to BALs. Lobes normal |
| | | 3.83 | F | | X | Right caudal lung, remaining lobes normal |
| | | 2.95 | F | X | | Gross congestion, possibly due to BALs. Lobes normal |
| | | 3.86 | F | | X | Gross congestion, possibly due to BALs. Lobes normal |
| | | 3.36 | F | X | | Right caudal lung, remaining lobes normal |
| | | 5.63 | M | | X | All lobes normal |

[0160] A strong inverse correlation could be assessed between vaccine-induced humoral and cellular immune responses, including S-, RBD-, and N-specific binding antibodies in serum and BAL, NAb, and S- and N-specific T cells, and SARS-CoV-2 viral loads in BAL and nasal swab samples (FIGS. 13A-13B). These results in sum demonstrate that 2D or 1 D vaccination regimen of COH04S1 protect NHP from lower and upper respiratory tract infection following INIT challenge with SARS-CoV-2.

### Example 6: NHP Vaccinated with 2D and 1 D Vaccination Regimen of COH04S1 Develop Robust Post-Challenge Anamnestic Immune Responses

[0161] To assess the vaccine impact on post-challenge viral immunity, humoral and cellular responses were evaluated in COH04S1-vaccinated NHP and control animals at 1, 2, and 3 weeks post-challenge (FIGS. 14A-14L, 15A-15D). This analysis revealed that control animals developed robust binding antibodies to 8, RBD, and N at 15 or 21 days post-challenge (FIGS. 14A-14F), which indicated stimulation of potent humoral responses by the SARS-CoV-2 challenge virus in naïve NHP. In contrast, NAb titers measured post-challenge in control animals by PRNT assay against infectious virus were in general relatively low or at the limit of detection (FIGS. 14G, 14J), although elevated NAb responses were observed in 1D mock-vaccinated control animals at days 15 and 21 post-challenge (FIG. 14J). In addition, no or only low-level T cell responses were detected post-challenge in control animals, with the exception of elevated frequencies of S- and N-specific IFNγ-expressing T cell responses in mock-vaccinated control animals at day 7 post-challenge (FIGS. 14H-141, 14K-14L).

[0162] Compared to antibodies measured pre-challenge in COH04S1-vaccinated NHP, boosted titers of S, RBD, and N antigen-specific binding antibodies and PRNT-assayed NAb were measured in COH04S1-vaccinated animals at days 15 and 21 post-challenge (FIGS. 14A-14G, 14J), indicating induction of robust post-challenge anamnestic immune responses. This post-challenge booster effect on SARS-CoV-2-specific humoral immunity appeared more pronounced in COH04S1-1 D-vaccinated NHP than in COH04S1-2D-vaccinated NHP, which may be a result of the lower pre-challenge responses in the 1 D vaccine group compared to the 2D vaccine group. In addition, binding antibodies and NAb measured at days 15 and 21 post-challenge in COH04S1-vaccinated NHP generally exceeded those measured in control animals, indicating heightened vaccine-mediated humoral recall responses against SARS-CoV-2 through 2D or 1 D vaccination. While S and N antigen-specific IFNγ-expressing T cell levels measured in COH04S1-2D-vaccinated animals tended to increase only slightly after challenge, a marked increase in post-challenge S- and N-specific IFNγ-expressing T cells was observed in COH04S1-1 D-vaccinated NHP, indicating potent vaccine-mediated cellular recall responses following 1 D vaccination. S- and N-specific IL-4-expressing T cells were either only very low or undetectable in COH04S1-vaccinated NHP and control animals at any time point post-challenge, consistent with Th1-biased immunity following challenge (FIGS. 15A-15D). Correlation analysis did not unambiguously reveal a strong association between any of the post-challenge immunological parameters and post-challenge virological assessments (FIGS. 13A-13B). These results demonstrate that NHP vaccinated with 2D or 1D vaccination regimen of COH04S1 develop potent anamnestic antiviral post-challenge recall responses.

### Example 7: Vaccination with COH04S1 and COH04S351 Protects Hamsters from Weight Loss Following SARS-CoV-2 Delta Variant Challenge

[0163] Syrian hamsters (N=10) were intramuscularly vaccinated two times in a 28-day interval with COH04S1 or COH04S351. COH04S1 comprises S and N antigen sequences based on the original SARS-CoV-2 Wuhan isolate, while COH04S351 comprises S and N antigen sequences based on SARS-CoV-2 B.1.351 beta variant. The DNA and protein sequences for the S antigen of COH04S351 are represented by SEQ ID NOs: 21 and 22, respectively, and the DNA and protein sequences for the N antigen of COH04S351 are represented by SEQ ID NOs: 23 and 24, respectively.

[0164] Control animals were vaccinated with sMVA control vector. All vaccines were administered at 1×10⁸ PFU. Two weeks post-boost, hamsters were challenged intranasally with a high dose (6.5×10⁴ TCID50 per hamster) of SARS-CoV-2 B.1.617.2 Delta variant (isolate USA/PHC658/2021, which has the following mutations in the S protein: T19R, K77T, deletion 157-158, L452R, T478K, D614G, P681R, and D950N). Body weight was measured daily for 10 days post-challenge. FIG. 16A shows that hamsters vaccinated with either COH04S1 or COH04S351 did not suffer from significant weight loss. FIG. 16B shows the maximal weight loss in single animals within vaccine and control groups (N=5).

[0165] As demonstrated herein, IM or IN vaccination of Syrian hamsters with COH04S1 stimulated robust Th1-biased S- and N-specific humoral immunity and cross-neutralizing antibodies (NAb) and protected against weight loss, lower respiratory tract infection, and lung injury following intranasal SARS-CoV-2 challenge. In addition, one- or two-dose vaccination of African green monkeys with COH04S1 induced robust antigen-specific binding antibodies, NAb, and Th1-biased T cells, protected against both upper and lower respiratory tract infection following IN/IT SARS-CoV-2 challenge, and triggered potent post-challenge anamnestic antiviral recall responses. These results demonstrate that COH04S1 stimulates protective immunity against SARS-CoV-2 in animal models through different vaccination routes and dose regimen, which complements ongoing investigation of this multi-antigen sMVA-vectored SARS-CoV-2 vaccine in clinical trials.

### Example 8: Comparison of COH04S1 and COH04S351 Immunogenicity in Mice

[0166] In this in vivo experiment, COH04S1 and COH04S351 immunogenicity was compared in balb/c mice.

[0167] As shown in FIGS. 17A-17B, female balb/c mice (N=6) were intraperitoneally vaccinated two times in a 21-day interval with COH04S351, COH04S1, a combination of COH04S351/COH04S1 in two different amounts, or with the two vaccines used in a heterologous prime/boost schedule. Control animals were vaccinated with sMVA control vector (N=6) or PBS (N=5). Single vaccines were administered at 1×10⁷ PFU. The combination of COH04S351/COH04S1 was administered at either 1×10⁷ PFU (mix2×) or 0.5×10⁷ (mix) PFU/each vaccine. Serum samples were collected at baseline, week 2, and endpoint (week 4), when splenocytes were also collected for immunological analyses.

[0168] Serum binding antibodies recognizing S, RBD, and N antigens based on the sequence from the original Wuhan strain (the ancestral Wuhan strain) were measured post-prime and post-boost vaccination by ELISA. As shown in FIG. 18, similar levels of S-, RBD-, and N-specific binding antibodies were induced post-prime and post-boost in animals vaccinated with the different vaccines and vaccine combinations. Some variability in the antibody titers was observed within the groups, probably due to technical error.

[0169] Binding antibodies recognizing S antigens from different variants of concern (VOC) were evaluated by ELISA. As shown in FIG. 19, both COH04S1 and COH04S351, and combinations of these vaccines, induced comparable S-specific binding antibodies recognizing S from the ancestral Wuhan strain, Beta, and Gamma (P.1) VOC.

[0170] To evaluate T cell responses to S and N antigens from different VOC, peptide libraries were assembled with peptides covering S and N sequences from the ancestral Wuhan strain, Beta, and Gamma VOC. The peptides were used to stimulate mouse splenocytes collected post-boost in an ELISPOT assay. As shown in FIG. 20, all vaccine combinations induced robust T cell responses to S and N antigens. In particular, COH04S351 vaccination appears to have induced stronger T cell responses to ancestral and VOC antigens than COH04S1.

[0171] These results demonstrate that COH04S1 and COH04S351, and combinations of these antigens, are similarly immunogenic in balb/c mice.

### Example 9: Comparison of COH04S1 and C170 Immunogenicity in Mice

[0172] In this in vivo experiment, COH04S1 and C170 immunogenicity was compared in balb/c mice. C170 is a SARS-CoV-2 candidate vaccine encoding for S and N from the Gamma variant of concern, P.1, originally isolated in Brazil. The DNA and protein sequences for the S antigen of C170 are represented by SEQ ID NOs: 29 and 30, respectively, and the DNA and protein sequences for the N antigen of C170 are represented by SEQ ID NOs: 31 and 32, respectively.

[0173] As shown in FIGS. 21A-21B, female balb/c mice (N=6) were intraperitoneally vaccinated two times in a 21-day interval with C170, COH04S1, a combination of C170/COH04S1 in two different amounts, or with the two vaccines used in a heterologous prime/boost schedule. Control animals were vaccinated with sMVA control vector or PBS (N=6). Single vaccines were administered at 1×10⁷ PFU. The combination of C170/COH04S1 was administered at either 1×10⁷ PFU (mix2×) or 0.5×10⁷ (mix) PFU/each vaccine. Serum samples were collected at baseline, week 2, and endpoint (week 4), when splenocytes were also collected for immunological analyses.

[0174] Serum binding antibodies recognizing S, RBD, and N antigens based on the sequence from the ancestral Wuhan strain were measured post-prime and post-boost vaccination by ELISA. As shown in FIG. 22, similar levels of S-, RBD-, and N-specific binding antibodies were induced post-prime and post-boost in animals vaccinated with the different vaccines and vaccine combinations.

[0175] Binding antibodies recognizing S antigens from different VOC were evaluated by ELISA. As shown in FIG. 23, both COH04S1 and C170, and combinations of these vaccines, induced comparable S-specific binding antibodies recognizing S from ancestral Wuhan strain, Beta, and Gamma (P.1) VOC.

[0176] NAb titers were measured in pooled post-boost serum samples using S-pseudoviruses based on the ancestral Wuhan strain with D614G substitution, Alpha, Beta, Gamma, and Delta VOC. As shown in FIG. 24, comparable titers of NAb to ancestral strain and VOC were measured post-boost in pooled serum samples.

[0177] To evaluate T cell responses to S and N antigens from different VOC, peptide libraries were assembled with peptides covering S and N sequences from ancestral Wuhan strain, Beta, and Gamma VOC. The peptides were used to stimulate mouse splenocytes collected post-boost in an ELISPOT assay. As shown in FIG. 25, all vaccine combinations induced robust T cell responses to S and N antigens.

[0178] These results demonstrate that COH04S1 and C170, and combinations of these antigens, are similarly immunogenic in balb/c mice.

### Example 10: Evaluation of COH04S1 and COH04S351 Immunogenicity in Hamsters

[0179] This example shows an in vivo study in golden Syrian hamsters aimed at the evaluation of immunogenicity and protective efficacy of COH04S1 and COH04S351. In a previous study, COH04S1 has shown to be protective and significantly reduce viral loads in lungs of hamsters challenged with ancestral SARS-CoV-2 (Washington strain). COH04S1-mediated protection early after challenge with different SARS-CoV-2 strains is investigated in this study and compared to the protection conferred by COH04S351, a second-generation sMVA COVID-19 vaccine based on VOC S and N sequences.

[0180] As shown in FIG. 26, Syrian hamsters (N=30) were intramuscularly vaccinated two times in a 28-day interval with COH04S1 or COH04S351. Control animals (N=30) were vaccinated with sMVA control vector. All vaccines were administered intramuscularly at 1×10⁸ PFU. Two weeks post-boost, hamsters were challenged intranasally with a high dose of SARS-CoV-2 Washington strain (WAS-Calu-3), B.1.351 Beta, or B.1.617.2 Delta variant (isolate USA/PHC658/2021). Body weight was measured daily for 10 days post-challenge. Because of the importance of assessing vaccine-mediated protective immunity at early and late time points post-challenge, 5 hamsters in each group were sacrificed at days 3 and 10 post-challenge for organ collection.

[0181] Serum samples collected 2 weeks post-prime were evaluated by ELISA for the presence of binding antibodies recognizing S, RBD, and N antigens based on ancestral SARS-CoV-2 sequences (FIG. 27A). High titers binding antibodies to S, RBD, and N were measured in all animals at 2 weeks post-prime vaccination. S-specific binding antibodies were higher in COH04S1-vaccinated animals than in COH04S351-vaccinated animals. RBD- and N-specific binding antibody titers were comparable between the groups. Both COH04S1- and COH04S351-vaccinated animals developed robust binding antibody responses to ancestral-specific S, RBD, and N antigens as well as S antigens based on Beta, Delta, and the currently dominating Omicron variant (FIGS. 27A-27B). The same samples were evaluated for the presence of binding antibodies of the IgG2/3 or IgG1 type, which indicate a Th1 or Th2 response, respectively (FIG. 27C). High titers IgG2/3 antibodies binding S, RBD, and N were measured in all animals, while IgG1 titers were low or absent. Consequently, IgG2/3-IgG1 ratio for both COH04S1- and COH04S351-vaccinated animals was skewed toward a Th1 response independently for the antigen analyzed.

[0182] NAb titers were evaluated in pre-challenge serum samples by PRNT assay using original Washington strain and Beta and Delta VOC. As shown in FIGS. 27D-27F, NAb responses against the ancestral virus were measured in both COH04S1- and COH04S351-vaccinated animals, with no significant differences between the two vaccine groups, although ancestral-specific NAb titers in COH04S351-vaccinated animals tended to be slightly lower than those in COH04S1-vaccinated animals. While ancestral-specific NAb titers were significantly elevated in COH04S1-vaccinated animals compared to controls, there was no statistical significance of ancestral-specific NAb titers in COH04S351-vaccinated animals compared to controls, indicating reduced neutralizing activity against the ancestral virus in COH04S351-vaccinated animals compared to COH04S1-vaccinated animals. In contrast, neutralizing titers measured against the Beta and Delta variants were significantly higher in COH04S351-vaccinated animals than in COH04S1-vaccinated animals. Both Beta- and Delta-specific neutralizing responses were significantly elevated in COH04S351-vaccinated animals compared to controls, whereas there was no statistical significance in Beta- and Delta-specific neutralizing titers when comparing COH04S1-vaccinated animals to controls, indicating reduced or relatively low levels of Beta- and Delta-specific NAb responses in COH04S1-vaccinated animals. In total, these results demonstrate that COH04S1 stimulated robust humoral immunity against the ancestral virus but reduced antibody levels against the Beta and Delta variants, whereas COH04S351 elicited significantly elevated humoral responses against the Beta and Delta variant but reduced antibody responses against the ancestral virus.

[0183] Vial loads were measured at day 3 and 10 post challenge in lung tissue and nasal turbinates by quantification of SARS-CoV-2 sgRNA to gauge the amount of replicating virus at lower and upper respiratory tracts. Viral sgRNA loads measured in lung tissue of COH04S1- and COH04S351-vaccinated animals at day 3 and 10 following challenge with the ancestral virus or the variant viruses were consistently lower than those of control animals, indicating efficacy of both vaccines to control lower respiratory infection by ancestral SARS-CoV-2 and SARS-CoV-2 Beta and Delta variants at early and late stages after viral challenge (FIGS. 28A-28C). Notably, lungs viral loads of COH04S351-vaccinated animals were consistently lower than those of COH04S1-vaccinated animals following challenge with either the ancestral virus or the two variant viruses, indicating improved efficacy of COH04S351 over COH04S1 to protect hamsters from lower respiratory tract infection by ancestral virus and SARS-CoV-2 VOC. In addition, while sgRNA was undetectable in the lungs of only one or two COH04S1-vaccinated hamsters at day 10 following challenge with the ancestral virus or the Delta variant, sgRNA was undetectable in the lungs of a proportion of COH04S351-vaccinated hamsters at day 3 and 10 following challenge with the ancestral virus or either of the two variant viruses. Viral loads measured in nasal turbinates of COH04S1- and COH04S351-vaccinated animals at day 3 or 10 following challenge with the ancestral virus or the variant viruses were either similar or only moderately reduced compared to those of controls, suggesting limited efficacy of COH04S1 and COH04S351 to control upper respiratory tract infection by ancestral SARS-CoV-2 or SARS-CoV-2 VOC (FIGS. 28D-28F). These results show that COH04S1 and COH04S351 protect hamsters from lower respiratory tract infection following challenge with SARS-CoV-2 ancestral virus and Beta and Delta variants.

[0184] Compared to controls, COH04S1- and COH04S351-vaccinated hamsters showed significantly reduced lung histopathology at day 3 and 10 following challenge with the ancestral virus or the two variant viruses (FIGS. 28G-281). Lung pathology in COH04S1- and COH04S351-vaccinated hamsters following challenge with the ancestral virus or the two variant viruses was in most cases either limited or undetectable, with no significant differences between the two vaccine groups. In addition, while all control animals showed high-grade bronchioalveolar hyperplasia (i.e., type II pneumocyte hyperplasia) at day 10 following challenge with the ancestral virus or the two variant viruses, COH04S1- and COH04S351-vaccinated animals showed no bronchioalveolar hyperplasia in almost all cases, regardless of the challenge virus (FIGS. 28J-28L). Furthermore, lung inflammation assessed at day 3 and 10 following challenge with the ancestral virus or the two variant viruses in COH04S1- and COH04S351-vaccinated hamsters was significantly reduced when compared to control animals, independent of the used challenge strain (FIGS. 28M-280). These results demonstrate that COH04S1 and COH04S351 afford potent efficacy to protect Syrian hamsters from lung pathology following challenge with ancestral SARS-CoV-2 and SARS-CoV-2 Beta and Delta variants.

[0185] Two weeks post-boost, hamsters were challenged intranasally with a high inoculum of ancestral Wuhan SARS-CoV-2 or Beta or Delta VOC (FIGS. 29A-29F). In sMVA control animals, the animals' weight started decreasing from day 2 post-challenge and reached minimum levels between days 6 and 7, after which animals started gaining weight. By day 10 post-challenge, sMVA control animals had not returned to pre-challenge weight.

[0186] Hamsters vaccinated with COH04S1 and COH04S351 were protected against weight loss independently from the viral strain used to challenge the animals. Hamsters challenged with ancestral SARS-CoV-2 were equally protected by the two vaccines, which resulted in the animals starting to recover weight and showing significantly higher weight than sMVA control animals from day 3 post-challenge. Similar results were obtained in hamsters challenged with the beta and delta VOC with COH04S351-vaccinated hamsters presenting with a slightly reduced weight loss in comparison to COH04S1-vaccinated animals. Hamsters vaccinated with COH04S1 and COH04S351 and challenged with delta VOC had a significantly higher weight than sMVA controls starting from day 4 post-challenge, probably due to the overall milder weight loss induced by this delta variant challenge stock obtained from BEI Resources, which was later found to have a deleted orf7a gene possibly resulting in attenuated infectivity.

[0187] These results demonstrate that COH04S1 and COH04S351 are equally immunogenic and protective in hamsters against SARS-CoV-2 and its VOC.

### Example 11: Vaccine-Elicited Ancestral- and Variant-Specific Humoral Immune Responses

[0188] Syrian hamsters were vaccinated with COH04S1 or analogous vaccine constructs with Omicron BA.1 or Beta (B.1.351) sequence-specific S and N antigens, termed COH04S529 or COH04S351, respectively (FIGS. 30A-30B; Table 2). Hamsters were vaccinated twice in a 4-week interval by IM route. All three sMVA vaccines elicited potent post-prime binding antibody responses to S and N antigens of SARS-CoV-2 ancestral virus, Beta variant, and Omicron subvariants BA.1, BA.2, BA.2.12.1, and BA.4/5 (FIGS. 30C-30D). Consistent with the homologous antigen sequences, COH04S1 elicited higher IgG titers than the other vaccines to ancestral-specific S, while COH04S351 elicited higher IgG titers than the other vaccines to Beta (B.1.351)-specific S, and COH04S529 elicited higher IgG titers than the other vaccines to Omicron BA.1-specific S. While COH04S529 vaccination resulted in increased Omicron BA.2/BA.2.12.1-specific S titers compared to COH04S1 or COH04S351 vaccination, all three vaccines stimulated comparable IgG binding antibodies against Omicron BA.4/BA.5-specific S. Binding antibodies to ancestral- and variant-specific N antigens were generally comparable between the three vaccine groups, although BA.4-specific N titers induced by COH04S351 were significantly higher than those induced by COH04S529.

[0189] At 2 weeks post-vaccination prior to virus challenge, NAb responses were measured by PRNT assay against ancestral SARS-CoV-2 (USA-WA1/2020) and Omicron subvariant BA.1. NAb responses against ancestral SARS-CoV-2 were measured in all three vaccine groups, although ancestral-specific NAb titers in COH04S1- and COH04S351-vaccinated hamsters tended to be higher than those in COH04S529-vaccinated animals (FIG. 30E). Consistent with the exceptional Omicron immune evasion capacity, Omicron BA.1-specific NAb responses in COH04S1-vaccinated animals were either very low or remained undetectable. In contrast, hamsters vaccinated with COH04S529 or COH04S351 showed elevated Omicron BA.1-specific NAb titers, with highest BA.1-specific NAb titers in COH04S529-vaccinated animals, consistent with the BA.1-specific vaccine modification. These results demonstrate that COH04S1 and Omicron BA.1- and Beta-modified vaccines elicit strain-specific binding antibody and NAb responses against ancestral SARS-CoV-2, Beta variant, and Omicron subvariants.

### Example 12: Vaccine Protection Against Omicron BA.1 or BA.2.12.1 Virus-Induced Weight Loss

[0190] At 2 weeks post-vaccination, hamsters were challenged intranasally with either Omicron variant BA.1 or BA.2.12.1, and body weight was measured for 8 days. Hamsters vaccinated with sMVA without inserted antigens and unvaccinated hamsters were used as controls. Control animals showed progressive weight loss following challenge with BA.1 or BA.2.12.1, with maximum weight loss between 4% and 8% at day 6 post-vaccination. In contrast, body weight of hamsters vaccinated with COH04S1 or the variant-specific vaccines remained relatively stable or increased gradually over the 8-day observation period following challenge with either BA.1 or BA.2.12.1 (FIGS. 31A-31B). Notably, both COH04S529- and COH04S351-vaccinated animals showed consistently higher body weight than COH04S1-vaccinated hamsters following challenge with BA.1, suggesting improved vaccine efficacy through both the BA.1- and Beta-specific antigen modification to protect against BA.1-induced weight loss (FIG. 31A). In contrast, similar body weight changes were measured for all three vaccine groups following challenge with BA.2.12.1 (FIG. 31B). These results show that COH04S1 and Omicron BA.1 and Beta (B.1.351) sequence-modified vaccines protect hamsters from weight loss following challenge with Omicron BA.1 and BA.2.12.1.

### Example 13: Vaccine Protection Against Omicron BA.1 or BA.2.12.1 Respiratory Tract Infection

[0191] At days 4 and 8 post-challenge, viral loads were measured in lung tissue and nasal turbinates by quantification of SARS-CoV-2 genomic RNA (gRNA) and subgenomic RNA (sgRNA) to assess the magnitude of total and replicating virus at lower and upper respiratory tracts. Compared to the high lung viral load measured in control animals, significantly reduced gRNA and sgRNA levels were measured in the lungs of all three vaccine groups at day 4 following virus challenge with BA.1 or BA.2.12.1 (FIGS. 32A-32D), indicating potent efficacy of all three vaccines to control lower respiratory tract infection by BA.1 or BA.2.12.1 (FIGS. 32C-32D). At day 8 following challenge with BA.1 or BA.2.12.1, lung gRNA levels in animals from all three vaccine groups were substantially lower than those in control groups (FIGS. 32A-32B). In addition, in contrast to all or most control animals, all animals of the vaccine groups had undetectable lung sgRNA at day 8 following BA.1 or BA.2.12.1 virus challenge (FIGS. 32C-32D), indicating complete control of replicating virus in the lungs of all animals in the vaccine groups. While both COH04S529- and COH04S531-vaccinated animals had slightly reduced lung viral loads compared to COH04S1-vaccinated animals, these minor differences in lung viral loads between the three vaccine groups were not statistically significant. The strongest reduction in lung gRNA viral load following BA.1 or BA.2.12.1 challenge was observed for COH04S529-vaccinated animals (FIGS. 32A-32B). Moreover, in contrast to the animals in the COH04S1 and COH04S531 vaccine groups, all COH04S529-vaccinated animals had undetectable sgRNA at day 4 following BA.1 challenge (FIG. 32C). Compared to the potent vaccine efficacy to prevent Omicron infection in the lower respiratory tract, the vaccine efficacy to control Omicron infection in the upper respiratory tract was less evident (FIGS. 33A-33D). While gRNA and sgRNA viral loads measured in nasal turbinates of all vaccine groups following challenge with BA.1 were consistently lower than those of the control groups (FIGS. 33A-33B), significant differences were found only between nasal sgRNA viral loads of COH04S351- or COH04S529-vaccinated hamsters and controls at day 8 following BA.1 challenge (FIG. 33C). In addition, while all three vaccine groups tended to have reduced nasal gRNA levels compared to controls following virus challenge with BA.2.12.1, sgRNA viral loads in nasal turbinates of all vaccine groups following BA.2.12.1 virus challenge were comparable to those of the control groups (FIGS. 33B, 33D). These results show that COH04S1 and Omicron BA.1- and Beta (B.1.351) sequence-modified vaccines protect hamsters against lower respiratory tract infection by Omicron BA.1 and BA.2.12.1.

### Example 14: Vaccine Protection Against Omicron BA.1 or BA.2.12.1 Virus-Induced Lung Pathology

[0192] Lung pathology in all three vaccine groups following virus challenge with BA.1 or BA.2.12.1 was significantly reduced when compared to controls (FIGS. 34A-34F, 35A-35B), indicating efficacy of all three vaccines to protect hamsters from BA.1- and BA.2.12.1-induced lung injury. In addition, a subset of control hamsters had moderate bronchioalveolar hyperplasia (i.e., type II pneumocyte hyperplasia) at day 4 following BA.1 virus challenge, and all control animals had moderate to high-grade bronchioalveolar hyperplasia at day 8 following viral challenge with BA.1 or BA.2.12.1. In contrast, bronchioalveolar hyperplasia was undetectable in animals of all three vaccine groups at days 4 and 8 following viral challenge with BA.1 or BA.2.12.1, with only one or two exceptions in the COH04S1 and COH04S351 vaccine groups that showed low-grade bronchioalveolar hyperplasia (FIGS. 34B, 34E). Lung pathology in all three vaccine groups appeared mostly associated with inflammation, which was detectable at low levels in all vaccine groups at days 4 and 8 following virus challenge with BA.1 or BA.2.12.1, albeit at significantly reduced levels across all vaccine groups compared to controls (FIGS. 34C, 34F), confirming potent efficacy of all three vaccines to protect against BA.1- or BA.2.12.1-induced lung pathology. While both COH04S529- and COH04S351-vaccinated animals showed slightly reduced lung pathology compared to COH04S1-vaccinated animals following challenge with BA.2 or BA.2.12.1, these minor differences in lung pathology between the vaccine groups following challenge with BA.1 or BA.2.12.1 were not statistically significant (FIGS. 34A-34F). The only exception was found at day 4 following viral challenge with BA.1, where COH04S529-vaccinated hamsters showed significantly reduced lung inflammation compared to COH04S1-vaccinated animals (FIG. 34C). These results show that COH04S1 and Omicron BA.1 and Beta sequence-modified vaccines protect hamsters from lung pathology following virus challenge with Omicron subvariants BA.1 and BA.2.12.1.

### Example 15: Additional Examples

### Example 15-1

[0193] A reconstituted recombinant synthetic MVA (rsMVA) virus, comprising: a full-length synthetic MVA (sMVA) genome backbone comprising a nucleotide sequence identical or substantially identical to a parental MVA genome, wherein the full-length sMVA genome backbone is not intentionally modified as compared to a parental MVA genome; a heterologous DNA sequence encoding a coronavirus nucleocapsid (N) protein or immunogenic portion thereof inserted in the Del2 insertion site of the sMVA backbone, wherein the heterologous DNA sequence comprises any N protein sequence disclosed herein, in the appendices, or incorporated by reference; a heterologous DNA sequence encoding a coronavirus spike (S) protein or immunogenic portion thereof inserted in the Del3 insertion site of the sMVA backbone, wherein the heterologous DNA sequence comprises any S protein sequence disclosed herein, in the appendices, or incorporated by reference; wherein the N and S proteins are expressed by the reconstituted rsMVA virus.

### Example 15-2

[0194] A recombinant synthetic MVA (rsMVA) virus, comprising:
[0195] a full-length synthetic MVA (sMVA) genome backbone assembled upon homologous recombination of three chemically synthesized DNA fragments, F1, F2, and F3,
[0196] wherein each of F1, F2, and F3 contain a partial sequence of a full-length parental MVA genome,
[0197] wherein each of the partial sequences is not intentionally modified [[or identical or substantially identical]] as compared to the corresponding sequence of the parental MVA genome,
[0198] wherein F1 comprises (i) a first partial sequence of the parental MVA genome and (ii) a heterologous DNA sequence encoding a coronavirus nucleocapsid (N) protein or immunogenic portion thereof inserted in the Del2 insertion site of the first partial sequence, wherein the heterologous DNA sequence comprises any N protein sequence disclosed herein, in the appendices, or incorporated by reference,
[0199] wherein F2 comprises a second partial sequence of the parental MVA genome adjacent the first partial sequence, wherein the 5′ end of the second partial sequence overlaps with the 3′ end of the first partial sequence,
[0200] wherein F3 comprises (i) a third partial sequence of the parental MVA genome adjacent the second partial sequence, wherein the 5′ end of the second partial sequence overlaps with the 3′ end of the second partial sequence, and (ii) a heterologous DNA sequence encoding a coronavirus spike (S) protein or immunogenic portion thereof inserted in the Del3 insertion site of the first partial sequence, wherein the heterologous DNA sequence comprises any S protein sequence disclosed herein, in the appendices, or incorporated by reference.

### Example 15-3

[0201] The rsMVA virus of Example 15-1 or 15-2, wherein the N and S proteins are expressed by the reconstituted rsMVA virus.

### Example 15-4

[0202] The rsMVA virus of Example 15-1 or 15-2, wherein the full-length sMVA backbone is identical or substantially identical to the full-length parental MVA genome.

### Example 15-5

[0203] The rsMVA virus of Example 15-1 or 15-2, wherein the full-length parental MVA genome comprises a nucleotide sequence identical or substantially identical to NCBI Accession #U94848.

### Example 15-6

[0204] The rsMVA virus of Example 15-1 or 15-2, wherein the full-length sMVA backbone comprises one or more nucleotide alterations originating from the chemical synthesis of the first, second, or third partial sequences or from the cloning or propagation of F1, F2, or F3.

### Example 15-7

[0205] The rsMVA virus of Example 15-1 or 15-2, wherein the one or more nucleotide alterations comprise a single T to A nucleotide alteration located in the IGR at three base pairs downstream of open reading frame (ORF) 021L originating from the chemical synthesis of F1 or from the cloning or propagation of F1.

### Example 15-8

[0206] The rsMVA virus of Example 15-1 or 15-2, wherein the full-length sMVA genome backbone comprises the internal unique region (UR) of the full-length parental MVA genome.

### Example 15-9

[0207] The rsMVA virus of Example 15-1 or 15-2, wherein the full-length sMVA genome backbone further comprises inverted terminal repeat (ITR) regions of the full-length parental MVA genome flanking the UR.

### Example 15-10

[0208] The rsMVA virus of Example 15-1 or 15-2, wherein F1, F2, and F3 are each flanked by CR/HL/CR sequences derived from the full-length parental MVA genome.

### Example 15-11

[0209] The rsMVA virus of Example 15-1 or 15-2, wherein the first partial sequence comprises nucleotides 191-59743 of NCBI Accession #U94848; the second partial sequence comprises nucleotides 56744-119298 of NCBI Accession #U94848; and the third partial sequence comprises nucleotides 116299-177898 of NCBI Accession #U94848.

### REFERENCES

[0210] The references, patents, and published patent applications listed below, and all references cited in the specification above, are hereby incorporated by reference in their entirety, as if fully set forth herein.
[0211] 1 Zhou, P. et al. A pneumonia outbreak associated with a new coronavirus of probable bat origin. Nature 579, 270-273, doi:10.1038/s41586-020-2012-7 (2020).
[0212] 2 Zhu, N. et al. A Novel Coronavirus from Patients with Pneumonia in China, 2019. N Engl J Med 382, 727-733, doi:10.1056/NEJMoa2001017 (2020).
[0213] 3 Baden, L. R. et al. Efficacy and Safety of the mRNA-1273 SARS-CoV-2 Vaccine. N Engl J Med 384, 403-416, doi:10.1056/NEJMoa2035389 (2021).
[0214] 4 Polack, F. P. et al. Safety and Efficacy of the BNT162b2 mRNA Covid-19 Vaccine. N Engl J Med 383, 2603-2615, doi:10.1056/NEJMoa2034577 (2020).
[0215] Voysey, M. et al. Safety and efficacy of the ChAdOx1 nCoV-19 vaccine (AZD1222) against SARS-CoV-2: an interim analysis of four randomised controlled trials in Brazil, South Africa, and the UK. Lancet 397, 99-111, doi:10.1016/S0140-6736(20)32661-1 (2021).
[0216] 6 Logunov, D. Y. et al. Safety and efficacy of an rAd26 and rAd5 vector-based heterologous prime-boost COVID-19 vaccine: an interim analysis of a randomised controlled phase 3 trial in Russia. Lancet 397, 671-681, doi:10.1016/S0140-6736(21)00234-8 (2021).
[0217] 7 Sadoff, J. et al. Safety and Efficacy of Single-Dose Ad26.COV2.S Vaccine against Covid-19. N Engl J Med, doi:10.1056/NEJMoa2101544 (2021).
[0218] 8 Krammer, F. SARS-CoV-2 vaccines in development. Nature 586, 516-527, doi:10.1038/s41586-020-2798-3 (2020).
[0219] 9 Premkumar, L. et al. The receptor binding domain of the viral spike protein is an immunodominant and highly specific target of antibodies in SARS-CoV-2 patients. Sci Immunol 5, doi:10.1126/sciimmunol.abc8413 (2020).
[0220] McMahan, K. et al. Correlates of protection against SARS-CoV-2 in rhesus macaques. Nature 590, 630-634, doi:10.1038/s41586-020-03041-6 (2021).
[0221] 11 Krammer, F. Correlates of protection from SARS-CoV-2 infection. Lancet 397, 1421-1423, doi:10.1016/S0140-6736(21)00782-0 (2021).
[0222] 12 Heath, P. T. et al. Safety and Efficacy of NVX-CoV2373 Covid-19 Vaccine. N Engl J Med, doi:10.1056/NEJMoa2107659 (2021).
[0223] 13 Tegally, H. et al. Detection of a SARS-CoV-2 variant of concern in South Africa. Nature 592, 438-443, doi:10.1038/s41586-021-03402-9 (2021).
[0224] 14 Garcia-Beltran, W. F. et al. Multiple SARS-CoV-2 variants escape neutralization by vaccine-induced humoral immunity. Cell 184, 2523, doi:10.1016/j.cell.2021.04.006 (2021).
[0225] Zhou, D. et al. Evidence of escape of SARS-CoV-2 variant B.1.351 from natural and vaccine-induced sera. Cell 184, 2348-2361 e2346, doi:10.1016/j.cell.2021.02.037 (2021).
[0226] 16 Faria, N. R. et al. Genomics and epidemiology of the P.1 SARS-CoV-2 lineage in Manaus, Brazil. Science, doi:10.1126/science.abh2644 (2021).
[0227] 17 Dejnirattisai, W. et al. Antibody evasion by the P.1 strain of SARS-CoV-2. Cell, doi:10.1016/j.cell.2021.03.055 (2021).
[0228] 18 Moore, J. P. & Offit, P. A. SARS-CoV-2 Vaccines and the Growing Threat of Viral Variants. JAMA 325, 821-822, doi:10.1001/jama.2021.1114 (2021).
[0229] 19 Madhi, S. A. et al. Efficacy of the ChAdOx1 nCoV-19 Covid-19 Vaccine against the B.1.351 Variant. N Engl J Med, doi:10.1056/NEJMoa2102214 (2021).
[0230] 20 Cox, R. J. & Brokstad, K. A. Not just antibodies: B cells and T cells mediate immunity to COVID-19. Nat Rev Immunol 20, 581-582, doi:10.1038/s41577-020-00436-4 (2020).
[0231] 21 Grifoni, A. et al. Targets of T Cell Responses to SARS-CoV-2 Coronavirus in Humans with COVID-19 Disease and Unexposed Individuals. Cell 181, 1489-1501 e1415, doi:10.1016/j.cell.2020.05.015 (2020).
[0232] 22 Ni, L. et al. Detection of SARS-CoV-2-Specific Humoral and Cellular Immunity in COVID-19 Convalescent Individuals. Immunity, doi:10.1016/j.immuni.2020.04.023 (2020).
[0233] 23 Dutta, N. K., Mazumdar, K. & Gordy, J. T. The Nucleocapsid Protein of SARS-CoV-2: a Target for Vaccine Development. J Virol 94, doi:10.1128/JVI.00647-20 (2020).
[0234] 24 Peng, Y. et al. Broad and strong memory CD4(+) and CD8(+) T cells induced by SARS-CoV-2 in UK convalescent individuals following COVID-19. Nat Immunol, doi:10.1038/s41590-020-0782-6 (2020).
[0235] Harris, P. E. et al. A Synthetic Peptide CTL Vaccine Targeting Nucleocapsid Confers Protection from SARS-CoV-2 Challenge in Rhesus Macaques. Vaccines (Basel) 9, doi:10.3390/vaccines9050520 (2021).
[0236] 26 Dangi, T., Class, J., Palacio, N., Richner, J. M. & Penaloza MacMaster, P. Combining spike- and nucleocapsid-based vaccines improves distal control of SARS-CoV-2. Cell Rep, 109664, doi:10.1016/j.celrep.2021.109664 (2021).
[0237] 27 Hong, S. H. et al. Immunization with RBD-P2 and N protects against SARS-CoV-2 in nonhuman primates. Sci Adv 7, doi:10.1126/sciadv.abg7156 (2021).
[0238] 28 Matchett, W. E. et al. Nucleocapsid Vaccine Elicits Spike-Independent SARS-CoV-2 Protective Immunity. J Immunol, doi:10.4049/jimmunol.2100421 (2021).
[0239] 29 Chiuppesi, F. et al. Development of a multi-antigenic SARS-CoV-2 vaccine candidate using a synthetic poxvirus platform. Nat Commun 11, 6121, doi:10.1038/s41467-020-19819-1 (2020).
[0240] 30 Gilbert, S. C. Clinical development of Modified Vaccinia virus Ankara vaccines. Vaccine 31, 4241-4246, doi:10.1016/j.vaccine.2013.03.020 (2013).
[0241] 31 Sutter, G. & Moss, B. Nonreplicating vaccinia vector efficiently expresses recombinant genes. Proc Natl Acad Sci USA 89, 10847-10851 (1992).
[0242] 32 Volz, A. & Sutter, G. Modified Vaccinia Virus Ankara: History, Value in Basic Research, and Current Perspectives for Vaccine Development. Adv Virus Res 97, 187-243, doi:10.1016/bs.aivir.2016.07.001 (2017).
[0243] 33 Pittman, P. R. et al. Phase 3 Efficacy Trial of Modified Vaccinia Ankara as a Vaccine against Smallpox. N Engl J Med 381, 1897-1908, doi:10.1056/NEJMoa1817307 (2019).
[0244] 34 Wussow, F. et al. Human cytomegalovirus vaccine based on the envelope gH/gL pentamer complex. PLoS Pathog 10, e1004524, doi:10.1371/journal.ppat.1004524 (2014).
[0245] Wussow, F. et al. A vaccine based on the rhesus cytomegalovirus UL128 complex induces broadly neutralizing antibodies in rhesus macaques. J Virol 87, 1322-1332, doi:10.1128/JVI.01669-12 (2013).
[0246] 36 Chiuppesi, F. et al. Multiantigenic Modified Vaccinia Virus Ankara Vaccine Vectors To Elicit Potent Humoral and Cellular Immune Reponses against Human Cytomegalovirus in Mice. J Virol 92, doi:10.1128/JVI.01012-18 (2018).
[0247] 37 La Rosa, C. et al. MVA vaccine encoding CMV antigens safely induces durable expansion of CMV-specific T-cells in healthy adults. Blood, doi:10.1182/blood-2016-07-729756 (2016).
[0248] 38 Aldoss, I. et al. Poxvirus Vectored Cytomegalovirus Vaccine to Prevent Cytomegalovirus Viremia in Transplant Recipients: A Phase 2, Randomized Clinical Trial. Ann Intern Med 172, 306-316, doi:10.7326/M19-2511 (2020).
[0249] 39 Yuan, Y. et al. Complete regression of cutaneous metastases with systemic immune response in a patient with triple negative breast cancer receiving p53MVA vaccine with pembrolizumab. Oncoimmunology 6, e1363138, doi:10.1080/2162402X.2017.1363138 (2017).
[0250] Tostanoski, L. H. et al. Ad26 vaccine protects against SARS-CoV-2 severe clinical disease in hamsters. Nat Med 26, 1694-1700, doi:10.1038/s41591-020-1070-6 (2020).
[0251] 41 Sanchez-Felipe, L. et al. A single-dose live-attenuated YF17D-vectored SARS-CoV-2 vaccine candidate. Nature 590, 320-325, doi:10.1038/s41586-020-3035-9 (2021).
[0252] 42 Yahalom-Ronen, Y. et al. A single dose of recombinant VSV-G-spike vaccine provides protection against SARS-CoV-2 challenge. Nat Commun 11, 6402, doi:10.1038/s41467-020-20228-7 (2020).
[0253] 43 Chan, J. F. et al. Simulation of the Clinical and Pathological Manifestations of Coronavirus Disease 2019 (COVID-19) in a Golden Syrian Hamster Model: Implications for Disease Pathogenesis and Transmissibility. Clin Infect Dis 71, 2428-2446, doi:10.1093/cid/ciaa325 (2020).
[0254] 44 Sia, S. F. et al. Pathogenesis and transmission of SARS-CoV-2 in golden hamsters. Nature 583, 834-838, doi:10.1038/s41586-020-2342-5 (2020).
[0255] Imai, M. et al. Syrian hamsters as a small animal model for SARS-CoV-2 infection and countermeasure development. Proc Natl Acad Sci USA 117, 16587-16595, doi:10.1073/pnas.2009799117 (2020).
[0256] 46 Hoffmann, M. et al. SARS-CoV-2 Cell Entry Depends on ACE2 and TMPRSS2 and Is Blocked by a Clinically Proven Protease Inhibitor. Cell 181, 271-280 e278, doi:10.1016/j.cell.2020.02.052 (2020).
[0257] 47 Wrapp, D. et al. Cryo-EM structure of the 2019-nCoV spike in the prefusion conformation. Science 367, 1260-1263, doi:10.1126/science.abb2507 (2020).
[0258] 48 Walls, A. C. et al. Structure, Function, and Antigenicity of the SARS-CoV-2 Spike Glycoprotein. Cell 181, 281-292 e286, doi:10.1016/j.cell.2020.02.058 (2020).
[0259] 49 Woolsey, C. et al. Establishment of an African green monkey model for COVID-19 and protection against re-infection. Nat Immunol 22, 86-98, doi:10.1038/s41590-020-00835-8 (2021).
[0260] 50 Munster, V. J. et al. Respiratory disease in rhesus macaques inoculated with SARS-CoV-2. Nature, doi:10.1038/s41586-020-2324-7 (2020).
[0261] 51 Chandrashekar, A. et al. SARS-CoV-2 infection protects against rechallenge in rhesus macaques. Science 369, 812-817, doi:10.1126/science.abc4776 (2020).
[0262] 52 Corbett, K. S. et al. Evaluation of the mRNA-1273 Vaccine against SARS-CoV-2 in Nonhuman Primates. N Engl J Med 383, 1544-1555, doi:10.1056/NEJMoa2024671 (2020).
[0263] 53 Vogel, A. B. et al. BNT162b vaccines protect rhesus macaques from SARS-CoV-2. Nature 592, 283-289, doi:10.1038/s41586-021-03275-y (2021).
[0264] 54 van Doremalen, N. et al. ChAdOx1 nCoV-19 vaccine prevents SARS-CoV-2 pneumonia in rhesus macaques. Nature 586, 578-582, doi:10.1038/s41586-020-2608-y (2020).
[0265] 55 Yu, J. et al. DNA vaccine protection against SARS-CoV-2 in rhesus macaques. Science, doi:10.1126/science.abc6284 (2020).
[0266] 56 Cross, R. W. et al. Intranasal exposure of African green monkeys to SARS-CoV-2 results in acute phase pneumonia with shedding and lung injury still present in the early convalescence phase. Virol J 17, 125, doi:10.1186/s12985-020-01396-w (2020).
[0267] 57 Geers, D. eta. SARS-CoV-2 variants of concern partially escape humoral but not T-cell responses in COVID-19 convalescent donors and vaccines. Sci Immunol 6, doi:10.1126/sciimmunol.abj1750 (2021).
[0268] 58 Routhu, N. K. et al. A modified vaccinia Ankara vector-based vaccine protects macaques from SARS-CoV-2 infection, immune pathology, and dysfunction in the lungs. Immunity 54, 542-556 e549, doi:10.1016/j.immuni.2021.02.001 (2021).
[0269] 59 Liu, R. et al. One or two injections of MVA-vectored vaccine shields hACE2 transgenic mice from SARS-CoV-2 upper and lower respiratory tract infection. Proc Natl Acad Sci USA 118, doi:10.1073/pnas.2026785118 (2021).
[0270] 60 Garcia-Arriaza, J. et al. COVID-19 vaccine candidates based on modified vaccinia virus Ankara expressing the SARS-CoV-2 spike induce robust T- and B-cell immune responses and full efficacy in mice. J Virol, doi:10.1128/JVI.02260-20 (2021).
[0271] 61 Tscherne, A. et al. Immunogenicity and efficacy of the COVID-19 candidate vector vaccine MVA-SARS-2-S in preclinical vaccination. Proc Natl Acad Sci USA 118, doi:10.1073/pnas.2026207118 (2021).
[0272] 62 Rice, A. et al. Intranasal plus subcutaneous prime vaccination with a dual antigen COVID-19 vaccine elicits T-cell and antibody responses in mice. Sci Rep 11, 14917, doi:10.1038/s41598-021-94364-5 (2021).
[0273] 63 Iwasaki, A. & Yang, Y. The potential danger of suboptimal antibody responses in COVID-19. Nat Rev Immunol 20, 339-341, doi:10.1038/s41577-020-0321-6 (2020).
[0274] 64 Graham, B. S. Rapid COVID-19 vaccine development. Science 368, 945-946, doi:10.1126/science.abb8923 (2020).
[0275] 65 Koch, T. et al. Safety and immunogenicity of a modified vaccinia virus Ankara vector vaccine candidate for Middle East respiratory syndrome: an open-label, phase 1 trial. Lancet Infect Dis 20, 827-838, doi:10.1016/S1473-3099(20)30248-6 (2020).
[0276] 66 Haagmans, B. L. et al. An orthopoxvirus-based vaccine reduces virus excretion after MERS-CoV infection in dromedary camels. Science 351, 77-81, doi:10.1126/science.aad1283 (2016).
[0277] 67 Halle, S. et al. Induced bronchus-associated lymphoid tissue serves as a general priming site for T cells and is maintained by dendritic cells. J Exp Med 206, 2593-2601, doi:10.1084/jem.20091472 (2009).
[0278] 68 Crawford, K. H. D. et al. Protocol and Reagents for Pseudotyping Lentiviral Particles with SARS-CoV-2 Spike Protein for Neutralization Assays. Viruses 12, doi:10.3390/v12050513 (2020).

The application's sequence listing, which the Patent Office published only in electronic form, follows.

SEQUENCE LISTING (39 sequences)

SEQ ID NO: 1 - DNA, 166605 bp, synthetic construct
  source 1..166605: mol_type = other DNA
ttttatgagaccatcaaagagagaaagagaataaaaatattttttatgagaccatcaaagagagaaagagaataaaaatattttatgagaccatcaaagagagaaagagaataaaaatattttttatgagaccatcaaagagagaaagagaataaaaatattttatgagaccatcaaagagagaaagagaataaaaatattttttatgagaccatcaaagagagaaagagaataaaaatatttttgtatgagaccatcagaaagaggtttaatatttttgtgataccctgaaaggaaataggaatagtgtcataatcgtatcacactattgagacagaaaaagaagaagtcgcgagaggtaactttttgttttgcaaaccggaatatagtgtccggtacacttttttaattcgtggtgtgcctgaatcgttcgattaaccctactcatccaatttcagatgaatagagttatcgattcagacacacgctttgagttttgttgaatcgatgagtgaagtatcatcggttgcaccttcagatgccgatccgtcgacatacttgacctcaagttcagatgattccttgcacatgtctccgatacgaacgctaaactctagattcttgacacattttgtatcgacgatcgttgaaccgatgatatcttcgtaactcactttcttatgagagatgttagacccgagtactggatgggtcttgatgtcgctgtctttctcttcttcgctacatctgatgtcgatagacacctcacagtctttccatcagcggattctgagatggatttaatctgaggacatttggtgaatccaaagttcattctcagacctccaccgatgatggagtaataagtggtaggaggatctacatcctcgactgattccacctcgggatctggatctgactcggactctgtaatttccgttacggattggcaaatcttatcatcggtcggtgtttggtcttgctttgtgactttgataataacatcgattcccatatgatgtttgttttcttcttccgtacacgatgaggatgattgctgaagactggcaggcacatgcatgccagtacgatatattgtttcatgattgctattgattgagtactgttctttatgattctacttccttaccgtgcaataaattagaatatattttctacttttacgagaaattaattattgtatttatgggtgaaaaacttactataaaaagcgggtgggtttggaattagtgatcagtttatgtatatcgcaactaccgggcatatggctacattacccacatgataagagattgtatcagtttcgtagtcttgagtattggtattactatatagtatatagatgtcgacgctagagttactgtctccgaatgcggcatgatagtatcattctttgctttcgttaactgtttggaggaagaatctttgttattgcatttaatctcgaaattcagagtgcacacctttctcctgtaaagaaacctgaagtcgctaccttattaagaagacgggatcgcagtctttatgattcatagtaatagttagttccgacgttgagatggattcgctgagaccggtagtggtcgtccgagtacacgatgtgtcgttaactggatacaggttaatttccacatcgatatagttaaaggtatttctgggtacgggttcgcatttatctgcggaagagacggtgtgagaatatgttccgagaccacacggagaacagatgacgtctccggatactccgtatcctattccacattttgtttgggaaacacatgccttgcatccatgatcgggagagcattcacagattctattgtgagtcgtgttacacgatcgcgtcgacattgttgacagaaacgtgaccttcattcttaccgtcgtccataaatacgttaggtatgtaccacatactgtcgcgaacgatgcgtccatctcataatgatttactttttcataattaaagatgtgaaagaaaaccgaacaatatatttttttagtaatgtttatgcgagacatataaaataaactccgtgtttatgatgccggtaaatgtttttatcatcttggacggaatcgattttgtaatatgccatggaaacaggacattatcactccatgataaattatttaatggagtcgatcctctcattgttctttgcgtatctcaatctgtggcgtttgcttcgtttaaataatatatcaaacatggagacgcctgatatgtaggcattcttcattctattaatgtctgctctatagcgctttagttccttatgacgaccggcgatatcatacttactttagaaggaaaatcatcatctaggattaaggcgtatctgatacaggcgaataatggttcaggatatagatagcgtatatctctattaaatgcgtcaatcatagtctctagagtgggatggtaactcagtaataaatcaactagcttctctttggtaactgcttttctggatggccgtattgattatcgagcgtgacactcgctccatattccaataaccgctttgcaaattgtatattattgacatcgaccgcgtaatatagtagagttatcgatcatatctatatcatccatgtacttgcttagtatatcaaatacatcttcataacagtgatacccgcaattattaaatctcgataatatcagaccgtacatacatagacggccattgttagatatgtgatttacagccgcgtgtccatattttccacgataaaccttacgacgtttacatcgacgagattattattaacaaagttgttgtccgtcgtcttatccaacatgcattgaatgataggtatacttaccatatcgccgtaatgtaagtagtttatcagtatggcttgtacgatggattcatcctgttgtctaaatctctttagaatgttatcgatgatgtagtggttatattctctggaatcgtacgaagtaatactacgcattacgtcgacaagagtatgacgtctctcaataagaagattaacgatttccatgtctacattatatggggttactctaaatcgcttgtttagataatacgcctctaatatagggctgacgtcgtatactctacacgtgtccacatcctttattaataatctctatatctatggttgagcaagaccagtagtattggatggaaacattgttatcgatcaaacatttaattacatccttggatagagattctctatgagacgatatatagtaatgaagagagttcttacacatatcactgttgtacatacaggtacgaaatacgtaaccggtgctgtaacattctgatttaagaagccatagcaatacttctggtctcggattaggcgtcgttacgtatatatccaccaatccgagaccattgattgcataattcgtattcttggacggacgtatccgtttatccacaattaggtattttagcagacgtaagtcgaaatcatttatattcgacttgagttcgttagaggaattcgaatagctggatatcagtagatgcacaatctgagattttacgtatctatgcttactgtatgctcctagcggagttaatccttcgttgtttctacaaagtctctcgactccgcgagagagtaacagtcgaacaatcttaatgtctgtatcgcatttattggagacgtaacaatgtagcgcattgtttcctcgtctatctatatgttttgataagttgtgacacgtttcaatttctagttttatttttttgtacgtcacatcttcatccagtagacgacatagaatacatgtgcaatccatagctattctggtgctaattattcctcataagatgataaaaagtgtagtgagagagcatgaaggagatttagtatttagcagtgcggatatgatccaagagggtgagatagtcgttctcgttcagaatctttcgcagcataagtagtatgtcgatatacttatcgttgaagactcttccagagacgatagctgattgagtacaaagtccaatgattgcacgaagttcttcggcggttttcatggagtcatttctgatgaaacatttaatgatctaaatttcagtttatgtttgtaccccgtattcatacttaacaaattggtattacataccattaataatgcaagcataaaaaatcgttagtagatgtttctaaatataggttccgtaagcaaagaatataagaatgaagcggtaatgataaaatcaatcgttatctaaaatgatcatactcatttattttattctattatattaacacatacatttttaacagcaacacattcaatattgtattgttatttttatattatttacacaattaacaatatattattagtttatattactgaattaataatataaaattcccaatcttgtcataaacacacactgagaaacagcataaacacaaaatccatcaaaaatgttgataaattatctgatgttgttgttcgctgctatgataatcagatcattcgccgatagtggtaacgctatcgaaacgacatcgccagaaattacaaacgctacaacagatattccagctatcagattatgcggtccagagggagatggatattgtttacacggtgactgtatccacgctagagatatcgacggtatgtattgtagatgctctcatggttatacaggcattagatgtcagcatgtagtattagtagactatcaacgttcagaaaaaccaaacactacaacgtcatatatcccatctcccggtattatgcttgtattagtaggcattattattattacgtgttgtctattatctgtttataggttcactcgacgaactaaactacctatacaagatatggttgtgccataatttttataaattttttttatgagtatttttacaaaaatgtataaagtgtatgtcttatgtatatttataaaaatgctaaatatgcgatgtatctatgttatttgtatttatctaaacaatacctctacctctagatattatacaaaaattttttatttcggcatattaaagtaaaatctagttaccttgaaaatgaatacagtgggtggttccgtatcaccagtaagaacataatagtcgaatacagtatccgattgagattttgcatacaatactagtctagaaagaaatttgtaatcatcttctgtgacgggagtccatatatctgtatcatcgtcccatgctatattcctgttatcatcattagttaatgaaaataactctcgtgcttcagaaaagtcaaatattgtatccatacatacatctccaaaactatcgcttatacgtttatctttaacgatacctatacctagatggttatttactaacagacattttccagatctattgactataactcctatagtttccacatcaaccaagtaatgatcatctattgttatataacaataacataactcttttccgtttttatcagtatgtatatctatatcaacgtcgtcgttgtagtgaatagtagtcattgatctattatatgaaacggatatgtctagaacggcaattgttttacgtccagttaacactttcgttgatttaaagtctagagtctttgcaaacataatatccttatccgactttatatttcctgtagggtggtataattttattttgcctccacatatcggtgtttccaaatatattactagacaatattccatatagttattagttaagggtacccaattagaacacgtacgcttattatcatcatttggatcgtatttcataaaagttattgtactatcgatgtcaacacattctacattttttaatcgtctatatagtatttttctgatattttctataatatcagaattgtcttccatcggaagttgtatactatcggaatcagttacatgtttaaataattctctgatgtcattccttatacaatcaaattcattattaaacagtttaatagtctgtagacctttatcgtcgtaaatatccattgtcttattagttacgcttatttttatgtgtttttacgttgctttattatattttataagaatgattgtttgacgaatcacgagaactattaagacacattattaggtatatattataaaaaagtttttgattacgatgttataagaggaaagaggacacattaacatcatacatcaattaactacattcttataacatcgtaatcaaaagaattgcaattttgatgtataacaactgtcaatgggttatggaattgtatattacatattatacggtatgttggtaacgacaaataccgatcggtaattgtctgccggtgtaatagaattatatatatctatctattacaccggccttgtatacataataataagttgtggtagtatgatctccatatttataatttaggactttgtattcagtttttttggaatcataaaaaataaaaaaaagttttactaatttaaaattatttacatttttttcactgtttagtcgcggatatggaattcgatcctgccaaaatcaatacatcatctatagatcatgtaacaatattacaatacatagatgaaccaaatgatataagactaacagtatgcattatcacaaaaataaatccacatttggctaatcaatttcgggcttggaaaaaacgtatcgccggaagggactatatgactaacttatctagagatacaggaatacaacaatcaaaacttactgaaactgtcaaaaaaatagaaacatatatggtctatatatacactacaatttagttattaattggataaccgatgtgattatcaatcaatattaagaaggttggtaaattggtacatagctaataatacctatacacccaataatacaacaaccatttctgagttggatatcatcaaaatactggataaatacgaggacgtgtatagagtaagtaaagaaaaagaatgtgaaatttgctatgaagttgtttactcaaaacgatagatactttggtttattggattcgtgtaatcatatattttgcataacatgcatcaatatatggcatagaacacgaagagaaaccggtgcgtcggataattgtcctatatgtcgtacccgttttagaaacataacaatgagcaagttaactaataaataaaaagtttaatttgttgacgacgtatgtcgttattttttctcgtataaaagattaatttgattctaatataatctttagtattggataaatatcaattcaaattaattccattagattatatcataaataaaaatagtagcacgcactacttcagccaaatattcttttttgaaacgccatctatcgtagtgaggacacaagtgaacctataatgagcaaatttattagtatcggttacatgaaggactttacgtagagtggtgattccactatctgtggtacgaacggtttcatcttctttgatgccatcacccagatgttctataaacttggtatcctttgccaaccaatacatatagctaaactcaggcatatgttccacacatcctgaacaatgaaattctccagaagatgttacaatgtctagatttggacatttggtttcaaccgcgttaacatatgagtgaacacacccatacatgaaagcgatgagaaataggattttcatcttgccaaaatatcactagaaaaaatttatttatcaattttaaaggtataaaaaatacttattgttgctcgaatattttgtatttgatggtatacggaagattagaaatgtaggtattatcatcaactgattctatggttttatgtattctatcatgtttcactattgcgttggaaataatatcatatgcttccacatatattttattttgttttaactcataatactcacgtaattctggattattgacatatctatgaataattttagctccatgatcagtaaatattaatgagaacatagtattaccacctaccattatttttttcatctcattcaattcttaattgcaaagatctatataatcattatagcgttgacttatggactctggaatcttagacgatgtacagtcatctataatcatggcatatttaatacattgttttatagcatagtcgttatctacgatgttagatatttctctcaatgaatcaatcacacaatctaatgtaggtttatgacataatagcattttcagcagttcaatgtttttagattcgttgatggcaatggctatacatgtatatccgttatttgatctaatgttgacatctgaaccggattctagcagtaaagatactagagattgtttattatatctaacagccttgtgaagaagtgtttctcctcgtttgtcaatcatgttaatgtctttaagataaggtaggcaaatgtttatagtactaagaattgggcaagcataagacatgtcacaaagaccctttttgtatgtataagtgtaaaaattataacattcatagttggatttacataggtgtccaatcgggatctctccatcatcgagataattgatggcatctcccttccttttttagtagatatttcatcgtgtaagaatcaatattaatatttctaaagtatccgtgtatagcctctttatttaccacagttccatattccactagagggatatcgccgaatgtcatatactcaattagtatatgttggaggacatccgagttcattgttttcaatatcaaaaagatggtttccttatcatttctccatagtggtacaatactacacattattccgtgcggctttccattttccaaaaacaatttgaccaaatctacatctttattgtatctataatcactatttagataatcagccataattactcgagtgcaacatgttagatcgtctatatatgaataagccgtgttatctattcctttcattaacaatttaacgatgtctatatctatatgagatgacttaatataatattgaagagctgtacaatagtttttatctataaaagacggcttgattccgtgattaattagacatttaacaacttccggacgcacatatgctctcgtatccgactctgaatacagatgagagatgatatacagatgcaatacggtaccgcaatttcgtagttgataatcatcatacgcgtatcagtactcgtcctcataaagaacactgcagccattttctatgaacaaatcaataatttcaggaacaggatcatctgtcattacataattttctataactgaacgatggttttcacatttaacactcaagtcaaatccatgttctaccaacacctttatcaagtcaacgtctacatttttggatttcatatagctgaatatattaaagtcatttatgttgctaaatccagtggcttctagtagagccatcgctatatcctttaactttaacatgtctactatttgtgtattcttctaatggggtagctgtctccaatttttgcgtaatggattagtgccactgtctagtagtagtttgacgacctcgacattattacaatgctcattaaaaaggtatgcgtgtaaagcattattcttgaattggttcctggtatcattaggatctctgtctctcaacatctgtttaagttcatcgagagccacctcctcattttccaaatagtcaaacattttgactgaatgagctactgtgaactctatacacccacacaactaatgtcattaaatatcatgtcaaaaacttgtacaattattaataaaaataatttagtgtttaaattttaccagttccagattttacacctccgttaaccccactttttacaccactggacgatcctcctccccacattccaccgccaccagatgtataagttttagatcctttattactaccatcatgtccatggataaagacactccacatgccgccactaccccctttagaagacatattaataagacttaaggacaagtttaacaataaaattaatcacgagtaccctactaccaacctacactattatatgattatagtttctatttttacagtaccttaactaaagtctctagtcacaagagcaatactaccaacctacactattatatgattatagtttctatttttataggaacgcgtacgagaaaatcaaatgtctaatttctaacggtagtgttgataaacgattatcgtcaatggatacctcctctatcatgtcgtctattttcttactttgttctattaacttattagcattatatattatttgattataaaacttatattgcttattagcccaatctgtaaatatcggattattaacatatcgtttctttgtaggtttatttaacatgtacatcactgtaagcatgtccgtaccatttattttaatttgacgcatatccgcaatttctttttcgcagtcggttataaattctatatatgatggatacatgctacatgtgtacttataatcgactaatatgaagtacttgatacatattttcagtaacgatttattattaccacctatgaataagtacctgtgatcgtctaggtaatcaactgttttcttaatacattcgatggttggtaatttactcagaataatttccaatatcttaatatataattctgctatttctgggatatatttatctgccagtataacacaaatagtaatacatgtaaacccatattttgttattatattaatgtctgcgccattatctattaaccattctactaggctgacactatgcgacttaatacaatgataaagtatactacatccatgtttatatcatcaatatacggcttacaaagttttagtatcgataacacatccaactcacgcatagagaaggtagggaataatggcataatatttattaggttatcatcattgtcattatctacaactaagtttccattttttaaaatatactcgacaactttaggatctctattgccaaatttttgaaaatatttatttatatgcttaaatctatataatgtagctccttcatcaatcatacatttaataacattgatgtatactgtatgataagatacatattctaacaatagatcttgtatagaatctgtatatcttttaagaattgtggatattattacgtaaactattacacaattctaaaatataaaacgtatcacggtcgaataatagttgatcaactatataattatcgattttgtgatttttcttcctaaactgtttacgtaaatagttagatagaatattcattagttcatgaccactatagttactatcgaataacgcgtcaaatatttcccgtttaatatcgcatttgtcaagataataatagagtgtggtatgttcacgataagtataataacgcatctctttttcgtgtgaaattaaatagtttattacgtccaaagatgtagcataaccatcttgtgacctagtaataatataataatagagaactgttttacccattctatcatcataatcagtggtgtagtcgtaatcgtaattgtctaattcatcatcccaattataatattcaccagcacgtctaatctgttctattttgatcttgtatccatactgtatgttgctacatgtaggtattcctttatccaataatagtttaaacacatctacattgggatttgatgttgtagcgtatttttctacaatattaataccatttttgatactatttatttctatacctttcgaaattagtaatttcaataagtctatatcgatgttatcagaacatagatattcgagtatatcaaaatcattgatatttttatagtcgactgacgacaataacaaaatcacaacatcgtttttgatattattatttttcttggtaacgtatgcctttaatggagtttcaccatcatactcatataatggatttgcaccactttctatcaatgattgtgcactgctggcatcgatgttaaatgttttacaactatcatagagtatcttatcgttaaccatgattggttgttgatgctatcgcattttttggtttctttcatttcagttatgtatggatttagcacgtttgggaagcatgagctcatatgatttcagtactgtagtgtcagtactattagtttcaataagatcaatctctagatctatagaatcaaaacacgataggtcagaagataatgaatatctgtaggcttcttgttgtactgtaacttctcgttttgttagatgtttgcatcgtgctttaacatcaatggtacaaattttatcctcgctttgtgtatcatattcgtccctactataaaattgtatattcagattatcatgagatgtgtatacgctaacggtatcaataaacggagcacaccatttagtcataaccgtaatccaaaaatttttaaagtatatcttaacgaaagaagttgtgtcattgtctacggtgtatggtactagatcctcataagtgtatatatctagagtaatgtttaatttatcaaatggttgataatatggatcctcatgacaatttccgaagatggaaatgagatatagacatgcaataaatctaattgcggacatggttactccttaaaaaaatacgaataatcaccttggctatttagtaagtgtcatttaacactatactcatattaatccatggactcataatctctatacgggattaacggatgttctatatacggggatgagtagttttcttctttaactttatactttttactaatcatatttagactgatgtatgggtaatagtgtttaaagagttcgttctcatcatcagaataaatcaatatctctgtttttttgttatacagatgtattacagcctcatatattacgtaatagaacgtgtcatctaccttattaactttcaccgcatagttgtttgcaaatacggttaatcctttgacctcgtcgatttccgaccaatctgggcgtataatgaatctaaactttaatttcttgtaatcattcgaaataatttttagtttgcatccgtagttatcccctttatgtaactgtaaatttctcaacgcgatatctccattaataatgatgtcgaattcgtgctgtatacccatactgaatggatgaacgaataccgacggcgttaatagtaatttactttttcatctttacatattgggtactagttttactatcataagtttataaattccacaagctactatggaataagccaaccatcttagtataacacacatgtcttaaagtttattaattaattacatgttgttttatatatcgctacgaatttaaacagagaaatcagtttaggaaaaaaaaatatctatctacatcatcacgtctctgtattctacgatagagtgctactttaagatgagacatatccgtgtcatcaaaaatatactccattaaaatgattattccggcagcgaacttgatattggatatatcacaacctttgttaatatctacgacaatagacagcagtcccatggttccataaacagtgagtttatctttctttgaagagatattttgtagagatcttataaaactgtcgaatgacatcgcatttatatctttagctaaatcgtatatgttaccatcgtaatatctaaccgcgtctatcttaaacgtttccatcgctttaaagacgtttccgatagatggtctcatttcatcagtcatactgagccaacaaatataatcgtgtataacatctttgatagaatcagactctaaagaaaacgaatcggctttattatacgcattcatgataaacttaatgaaaaatgtttttcgttgtttaagttggatgaatagtatgtcttaataattgttattatttcattaattaatatttagtaacgagtacactctataaaaacgagaatgacataactagttatcaaagtgtctaggacgcgtaattttcatatggtatagatcctgtaagcattgtctgtattctggagctattttctctatatctaatttctgaacgttcaccaatgtctctagccactttggcactaatagcgatcattcgcttagcgtcttctatattattaactggttgattcaatctatctagcaatggaccgtcggacagcgtcattctcatgttcttaatcaatgtacatacatcgccgtcatctaccaattcatccaacaacataagctttttaaaatcatcattataataggtttgatcgttgtcatttctccaaagaatatatctaataagtagagtcctcatgattagttaacaactattttttatgttaaatcaattagtacaccgctatgtttaatacttattcatattttagtttttaggattgagaatcaatacaaaaattaatgcatcattaattttagaaatacttagtttccacgtagtcaatgaaacatttgaactcatcgtacaggacgttctcgtacaggacgtaactataaaccggtttatatttgttcaagatagatacaaatccgataactttttttacgaattctacgggatccactttaaaagtgtcataccgggttctttttatttttttaaacagattaatggtgtgatgttgattaggtcttttacgaatttgatatagaatagcgtttacatattctccataatggtcaatcgccatttgttcgtatgtcataaattctttaattatatgacactgtgtattatttagttcatccttgttcatcattaggaatctatccaatatggcaattatactagaactataggtgcgttgtatacacatattgatgtgtctgtttatacaatccatgctactaccttcgggtaaaattgtagcatcatataccatttctagtactttaggttcattgttatccattgcagaggacgtcatgacgcatcctaaaaaaatatattatttttatgttattttgttaaaaataatcatcgaatacgaatcatccagtccactgaatagcaaaatctttactattttggtatcttccaatgtggctgcctgatgtaatggaaattcattctctagaagatttttcaatgctccagcgttcaacaacgtacatactagacgcacgttattatcagctattgcataatacaaggcactatgtccatggacatccgccttaaatgcatctttgctagagagaaagcttttcagctgcttagacttccaagtattaattcgtgacagatccatgtctgaaacgagacgctaattagtgtataatttttgtcatattgcaccagaattaataatatctctaatagatctgattagtagatacatggctatcgcaaaacaacatatacacatttaataaaaataatatttattaagaaaattcagatttcacgtacccatcaatataaataaaataatgattccttacaccgtacccatattaaggagattctaccttacccataaacaatataaatccagtaatatcatgtctgatgatgaacacaaatggtgtattaaattccagtttttcaggagatgatctcgccgtagctaccataatagtagatgcctctgctacagttccttgttcgtcgacatctatctttgcattctgaaacattttataaatatataatgggtccctagtcatatgtttaaacgacgcattatctggattaaacatactaggagccatcatttcggctatcgacttaatatccctcttattttcgatagaaaatttagggagtttaagattgtacactttattccctaattgaaacgaccaatagtctaattttgcagccgtaatagaatctgtgaaatgggtcatattatcacctattgccaggtacatactaatattagcatccttatacggaaggcgtaccatgtcatattctttgtcatcgattgtgattgtatttccttgcaatttagtaactacgttcatcatgggaaccgttttcgtaccgtacttattagtaaaactagcattgcgtgttttagtgatatcaaacggatattgccatatacctttaaaatatatagtattaatgattgcccatagagtattattgtcgagcatattagaatctactacattagacataccggatctacgttctactatagaattaattttattaaccgcatctcgtctaaagtttaatctatataggccgaatctatgatattgttgataatacgacggtttaatacacacagtattatctacgaaactttgataagttagatcagtgtacgtatatttagatgttttcagcttagctaatcctgatattaattctgtaaatgctggacccagatctctttttctcaaatccatagtcttcaataattctattctagtattacctgatgcaggcaatagcgacataaacatagaaaacgaataaccaaacggtgagaagacaatattatcatcttgaatatttttatacgctactataccggcattggtaaatccttgtagacgataggtagacgctgaacacgttaacgatagtatcaataacgcaatcatgattttatggtattaataattaaccttatttttatgttcggtataaaaattattgatgtctacacatccttttgtaattgacatctatatatccttttgtataatcaactctaatcactttaacttttacagttttccctaccagtttatccctatattcaacatatctatccatatgcatcttaacactctctgccaagatagcttcagagtgaggatagtcaaaaagataaatatatagagcataatcattctcgtatactctgccctttattacatcgcccgcattgggcaacgaataacaaaatgcaagcatcttgttaacgggctcgtaaattgggataaaaattatgtttttatatctattttattcaagagaatattcaggaatttctttttccggttgtatctcatcgcagtatatatcatttgtacattgtttcatattttttaatagtttacaccttttagtaggactagtatcgtacaattcatagctgtattttgaattccaatcacgcataaaaatatcttctaattgttgacgaagacctaatccatcatccggtgtaatattaatagatgctccacatgtatccgtaaagtaatttcctgtccaatttgaggtacctatataggccgttttatcggttaccatatatttggcatggtttaccctagaatacggaatgggaggatcagcatctggtacaataaatagctttacttctatatttatgtttttagattttagcatagcgatagatcttaaaaagtttctcatgataaacgaagatcgttgccagcaactaatcaatagcttaacggatacttgtctgtctatagcggatcttcttaattcatcttctatataaggccaaaacaaaattttacccgccttcgaataaataatagggataaagttcataacagatacataaacgaatttactcgcatttctaatacatgacaataaagcggttaaatcattggttctttccatagtacatagttgttgcggtgcagaagcaataaatacagagtgtggaacaccacttacgttaatactaagaggatgatctgtattataatacgacggataaaagtttttccaattatatggtagattgttaactccaagataccagtatacctcaaaaatttgagtgagatccgctgccaagttcctattattgaagatcgcaatacccaattctttgacctgagttagtgatctccaatccatgttagcgcttcctaaataaatatgtgtattatcagatatccaaaattttgtatgaagaactcctcctaggatatttgtaatatctatgtatcgtacttcaactccggccatttgtagtctttcaacatcctttaatggtttgttagatttattgacggctactctaactcgtactcctcttttgggtaattgtacaatctcgtttaatattatcgtgccgaaattcgtacccacttcatccgataaactccaataaaaagatgatatatctagtgtttttgtggtattggatagaatttccctccacatgttaaatgtagacaaatatactttatcaaattgcatacctataggaatagtctctgtaatcactgcgattgtattatccggattcattttatttgttaaaagaataatcctatatcacttcactctattaaaaatccaagtttctatttctttcatgactgattttttaacttcatccgtttccttatgaagatgatgtttggcaccttcataaatttttatttctctattacaatttgcatgttgcatgaaataatatgcacctaaaacatcgctaatctcattgtttgttccctggagtatgagagtcggggtgttaatcttggaaattatttttctaaccttgttggtagccttcaagacctgactagcaaatccagccttaattttttcatgattgattaatgggtcgtattggtatttataaactttatccatatctctagatactgattctggacatagctttccgactggcgcatttggtgtgatggttcccataagtttggcagctagcagattcagtcttgaaacagcatctgcattaactagaggagacattagaatcattgctgtaaacaagtttggattatcgtaagaggctagtatagaaattgttgctcccatggaatgacccaataagtagatttaatagttaccacgtgctgtaccaaagtcatcaatcatcattttttcaccattacttcttccatgtccaatatgatcatgtgagaatactaaaattcctaacgatgatatgttttcagctagttcgtcataacgtccagaatgtttaccagctccatgacttatgaatactaatgccttaggatatgtaatcattgtccagattgaacatacagtttgcactcatgattcacgttatataactatcaatattaacagttcgtttgatgatcatattatttttatgttttattgataattgtaaaaacatacaattaaatcaatatagaggaaggagacggctactgtcttttgtgagatagtcatggcgactaaattagattatgaggatgctgttttttactttgtggatgatgataaaatatgtagtcgcgactccatcatcgatctaatagatgaatatattacgtggagaaatcatgttatagtgtttaacaaagatattaccagttgtggaagactgtacaaggaattgatgaagttcgatgatgtcgctatacggtactatggtattgataaaattaatgagattgtcgaagctatgagcgaaggagaccactacatcaattttacaaaagtccatgatcaggaaagtttattcgctaccataggaatatgtgctaaaatcactgaacattggggatacaaaaagatttcagaatctagattccaatcattgggaaacattacagatctgatgaccgacgataatataaacatcttgatactttttctagaaaaaaaattgaattgatgatataggggtcttcataacgcataattattacgttagcattctatatccgtgttaaaaaaaattatcctatcatgtatttgagagttttatatgtagcaaacatgatagctgtgatgccaataagctttagatattcacgcgtgctagtgttagggatggtattatctggtggtgaaatgtccgttatataatctacaaaacaatcatcgcatatagtatgcgatagtagagtaaacatttttatagtttttactggattcatacatcgtctacccaattcggttatgaatgaaattgtcgccaatcttacacccaaccccttgttatccattagtatagtattaacttcgttatttatgtcataaactgtaaatgattttgtagatgccatatcatacatgatattcatgtccctattataatcattactaactttatcacaatatatgttgataatatctatatatgatctagtctttgtgggcaactgtctatacaagtcgtctaaacgttgtttactcatatagtatcgaacagccatcattacatggtcccgttccgttgatagataatcgagtatgttagtggacttgtcaaatctatataccatattttctggaagtggatatacatagtcgtgatcaacattattgctagcctcatcttctatatcctgtactataccatctacataatctacgatattattacacataaacatcgacaacatactattgtttattatctaagtcctgttgatccaaacccttgatctcctctatttgtactatctagagattgtacttcttccagttctggataatatatacgttgatagattagctgagctattctatctccagtatttacattaaacgtacattttccattattaataagaatgactcctatgtttcccctataatcttcgtctattacaccacctcctatatcaatgccttttagtgacagaccagacctaggagctattctaccatagcaaatcttaggcatggacatactaatatctgtcttaattaactgtctttctcctggagggatagtataatcgtaagcgctatacaaatcatatccggcagcacccggcgattgcctagtaggagatttagctctgttagtttccttaacaaatctaactggtgagttaatattcatgttgaacataaaactaatattttatttcaaaattatttaccatcccatatattccatgaataagtgtgatgattgtacacttctatagtatctatatacgattcacgataaaatcctcctatcaatagcagtttattatccactatgatcaattctggattatccctcggataaataggatcatctatcagagtccatgtattgctggattcacaataaaattccgcatttctaccaaccaagaataaccttctaccgaacactaacgcgcatgatttataatgaggataataagtggatggtccaaactgccactgatcatgattgggtagcaaatattctgtagttgtatcagtttcagaatgtcctcccattacgtatataacattgtttatggatgccactgctggattacatctaggtttcagaagactcggcatattaacccaagcagcatccccgtggaaccaacgctcaacagatgtgggatttggtagacctcctactacgtataatttattgttagcgggtatcccgctagcatacagtctggggctattcatcggaggaattggaatccaattgtttgatatataatttacagctatagcattgttatgtatttcattgttcatccatccaccgatgagatatactacttctccaacatgagtacttgtacacatatggaatatatctataatttgatccatgttcataggatactctatgaatggatacttgtatgatttgcgtggttgtttatcacaatgaaatattttggtacagtctagtatccattttacattatttatacctctgggagaaagataatttgacctgattacatttttgataaggagtagcagatttcctaatttatttcttcgctttatataccacttaatgacaaaatcctcatctggaacatttagttcatcgctttctagaataagtttcatagatagataatcaaaattgtctatgatgtcatcttccagttccaaaaagtgtttggcaataaagtttttagtatgacataagagattggatagtccgtattctatacccatcatgtaacactcgacacaatattcctttctaaaatctcgtaggataaagtttatacaagtgtagatgataaattctacagaggttaatatagaagcacgtaataaattgacgacgttatgactatctatatatacctttccagtatatgagtaaataactatagaagttagactgtgaatgtcaaggtctagacaaaccctcgtaactggatctttatttttcgtgtatttttgacgtaaatgtgtgcgaaagtaaggagataactttttcaatatcgtagaattgactattatattgcctcctatggcatcaataattgttttgaatttcttagtcatagacaatgctaatatattcttacagtacacagtattgacaaatatcggcatttatgtttctttaaaagtcaacatctaaagaaaaatgattatcttcttgagacataactcccattttttggtattcacccacacgtttttcgaaaaaattagttttaccttctaatgatatattttccatgaaatcaaacggattggtaacattataaatttttttaaatcccaattcagaaatcaatctatccgcgacgaattctatatatgttttcatcatttcacaattcattcctataagtttaactggaagagccgcagtaagaaattcttgttcaatggataccgcatctgttataatagatctaacggtttcttcactcggtggatgcaataaatgtttaaacatcaaacatgcgaagtcgcagtgtagaccctcgtctctactaatcaattcgttggaaaacgtgagtccgggcattaggccacgctttttaagccaaaatatggaagcgaatgatccggaaaagaagattccttctactgcagcaaaggcaataagtctctctccataaccggcgctgtcatgtatccacttttgagcccaatcggccttcttttttacacaaggcatcgtttctatggcattaaagagatagtttttttcattactatctttaacataagtatcgatcaaaagactatacatttccgaatgaatgttttcaatggccatctgaaatccgtagaaacatctagcctcggtaatctgtacttctgtacaaaatcgttccgccaaattttcattcactattccgtcactggctgcaaaaaacgccaatacatgttttataaaatatttttcgtctggtgttagtttattccaatcattgatatctttagatatatctacttcttccactgtccaaaatgatgcctctgcctttttatacatgttccagatgtcatgatattggattgggaaaataacaaatctatttggatttggtgcaaggatgggttccataactaaattaacaataacaataaattttttttcagttatctatatgcctgtacttggatcttttgtacatcgatatcgccgcaatcactacaataattacaagtattattgatagcattgttattagtactatcataattaaattatcgttattatcattttgtaattgtgacatcatactagataaatcgtttgcgagattgttgtgggaagcgggcatggaggatgaattatcgttattattatttaaagcctcccattcggattcacaaatatggcgcgcgttcaacattttatggaaacagataacaagaaaactcgtcatcgttcaaatttttaacgatagtaaaccgattaaacgtcgagctaatttctaacgctagcgactctgttggatatgggtttccagatatatatcttttcagttcccctacgtatctataatcatctgtaggaaatggaagatatttccatttatctactgttcctaatatcatatgtggtggtgtagtagaaccattaagcgcgaaagatgttatttcgcatcgtattttaacttcgcaataatttctggttagataacgcactctaccagtcaagtcaatgatattagcctttacagatatattcatagtagtcgtaacgatgactccatcttttagatgcgatactcctttgtatgtaccagaatcttcgtacctcaaactcgatatatttaaacaagttaatgagatattaacgcgttttatgaatgatgatatataaccagaagttttatcctcggtggctagcgctataaccttatcattataataccaactagtgtgattaatatgtgacacgttagtgtgggtacaaatatgtacattatcgtctacgtcgtattcgatacatccgcatacagccaacaaatataaaatgacaaatactctaacgccgttcgtacccatcttgatgcggtttaataaatgttttgatttcaatttattgtaaaaaaagattcggttttatactgttcgatattctcattgcttatattttcatctatcatctccacacagtcaaatccgtggttagcatgcacctcatcaaccggtaaaagactatcggactcttctatcattataactctagaatatttaatttggtcattattaatcaagtcaattatcttatttttaacaaacgtgagtattttactcattttttataaaaacttttagaaatatacagactctatcgtgtgtctatatcttctttttatatccaatgtatttatgtctgatttttcttcatttatcatatataatggtccaaattctacacgtgcttcggattcatccagatcattaaggttcttataattgtaacatccttctcttccctcttctacatcttccttcttattcttattcttagcgtcacagaatctaccacagcaggatcccatgacgagcgtcatattaaactaatccattttcaattataatatacgattagtaatgaccattaaaataaaaatattcttcataaccggcaagaaagtgaaaagttcacattgaaactatgtcagtagtatacatcatgaaatgatgatatatatatactctattttggtggaggattatatgatataattcgtggataatcattcttaagacacatttcttcattcgtaaatcttttcacgttaaatgagtgtccatattttgcaatttcttcatatgatggcggtgtacgtggacgaggctgctcctgttcttgttgtagtcgccgactgtcgtgtctgcgtttagatccctccattatcgcgattgcgtagatggagtactattttataccttgtaattaaatttttttattaattaaacgtataaaaacgttccgtatctgtatttaagagccagatttcgtctaatagaacaaatagctacagtaaaaataactagaataattgctacacccactagaaaccacggatcgtaatacggcaatcggttttcgataataggtggaacgtatattttatttaaggacttaacaattgtctgtaaaccacaatttgcttccgcggatcctgtattaactatctgtaaaagcatatgttgaccgggcggagccgaacattctccgatatccaatttctgtatatctataatattattaacctccgcatacgcattacagttcttttctagcttggataccgcactaggtacatcgtctagatctattcctatttcctcagcgatagctcttctatccttttccggaagcaatgaaatcacttcaataaatgattcaaccatgagtgtgaaactaagtcgagaattactcatgcatttgttagttattcggagcgcgcaatttttaaactgtcctataacctctcctatatgaatagcacaagtgacattagtagggatagaatgttgagctaatttttgtaaataactatctataaaaagattatacaaagttttaaactctttagtttccgccatttatccagtctgagaaaatgtctctcataataaatttttccaagaaactaattgggtgaagaatggaaacctttaatctatatttatcacagtctgttttggtacacatgatgaattcttccaatgccgtactaaattcgatatctttttcgatttctggatatgtttttaataaagtatgaacaaagaaatggaaatcgtaataccagttatgtttaactttgaaattgttttttattttcttgttaatgattccagccacttgggaaaagtcaaagtcgtttaatgccgatttaatacgttcattaaaaacaaactttttatcctttagatgaattattattggttcattggaatcaaaaagtaagatattatcgggtttaagatctgcgtgtaaaaagttgtcgcagcatggtagttcgtaaattttaatgtataacagagccatctgtaaaaagataaactttatgtattgtaccaaagatttaaatcctaatttgatagctagctcggtatctactttatctgccgaatacagtgctaggggaaaaattataatatttcctctttcgtattcgtagttagttctcttttcatgttcgaaaaagtgaaacatgcggttaaaatagtttataacattaatattactgttaataactgccggataaaagtgggatagtaatttcacgaatttgatactgtcctttctctcgttaaacgcctttaaaaaaactttagaagaatatctcaatgatagttcctgaccatccatagtttgtatcaataatagcaacatatgaagaacacgtttatacagagtatgtaaaaatgttaatttatagtttaatcccatggcccacgcacacacgattaattttttttcatctccctttagattgttgtatagaaatttgggtactgtgaactccgccgtagtttccatgggactatataattttgtggcctcgaatacaaattttactacatagttatctatcttaaagactataccatatcctcctgtagatatgtgataaaaatcgtcgtttataggataaaatcgtttatccttttgttggaaaaaggatgaattaatgtaatcattctcttctatctttagtagtgtttccttattaaaattcttaaaataatttaacaatctaactgatggagcccaattttggtgtaaatctaattgggacattatattgttaaaatacaaacagtctcctaatataacagtatctgataatctatggggagacatccattgatattcaggggatgaatcattggcaacacccatttattgtacaaaaagccccaatttacaaacgaaagtccaggtttgatagagacaaactattaactattttgtctctgtttttaatttctttggtaatgaaattattcacaatatcagtatcttctttatctaccagagattttactaacttgataaccttggctgtctcattcaatagggtagtaatatttgtatgtgtgatattgatatcttttagaagtgattctttgatggtgccagcatacgaattacaataatgcagaaactcggttaacatgcaggaattatagtaagccaattccaattgttgcctgtgttgtattagagtgtcaatatgagcaatggtgtccttgcgtttctctgatagaatgcgagcagcgattttggcgttatcatttgacgatatttctggaatgacgaatcctgtttctactaactttttggtaggacaaagtgaaacaatcaagaagatagcttctcctcctatttgtggaagaaattgaactcctctagatgatctccttgacagatattggaccgaattacagaagtacctggaatgtaaagccctgaaaccccctcattttttaagcagattgttgccgtaaatcctgcactatgcccaagatagagagctcctttggtgaatccatctctatgtttcagtttaaccaagaaacagtcagctggtctaaaatttccatctctatctaatacagcatctaacttgatgtcaggaactatgaccggttatgttatatgtaacattgagtaaatccttaagttcataatcatcactgtcatcagttatgtacgatccaaacaatgtttctactggcatagtggatacgaagatgctatccatcagaatgtttccctgattagtattttctatatagctattcttctttaaacgattttccaaatcagtaactatgttcatttttttaggagtaggacgcctagccagtatggaagaggattttctagatcctctcttcaacatctttgatctcaatggaatgcaaaaccccatagtgtaacaaccaacgataaaaataatattgtttttcactttttataattttaccatctgactcatggattcattaatatctttataagagctactaacgtataattctttataactgaactgagatatatacaccggatctatggtttccataattgagtaaatgaatgctcggcaataactaatggcaaatgtataaaacaacgaaattatactagagttgttaaagttaatattttctatgagctgttccaataaattatttgttgtaactgcgttcaagtcataaatcatcttgatactatccagtaaaccgtttttaagttctggaatattattatcccattgtaaagcccctaattcgactatcgaatatcctgctctgatagcagtttcaatatcgacggacgtcaatactgtaataaaggtggtagtattgtcatcatcgtgataaactactggaatatggtcgttagtaggtacggtaactttacacaacgcgatatataactttccttttgtaccatttttaacgtagttgggacgtcctgcagggtattgttttgaagaaatgatatcgagaacagatttgatacgatatttgttggattcctgattatttactataatataatctagacagatagatgattcgataaatagagaaggtatatcgttggtaggataatacatccccattccagtattctcggatactctattaatgacactagttaagaacatgtcttctattctagaaaacgaaaacatcctacatggactcattaaaacttctaacgctcctgattgtgtctcgaatgcctcgtacaaggatttcaaggatgccatagattctttgaccaacgatttagaattgcgtttagcatctgatttttttattaaatcgaatggtcggctctctggtttgctaccccaatgataacaatagtcttgtaaagataaaccgcaagaaaatttatacgcatccatccaaataaccctagcaccatcggatgatattaatgtattattatagattttccatccacagttattgggccagtatactgttagcaacggtatatcgaatagattactcatgtaacctactagaatgatagttcgtgtactagtcataatatctttaatccaatctaagaaatttaaaattagattttttacactgttaaagttaacaaaggtattacccggatacgtggatatcatatatggtattggtccattatcagtaatagctccataaactgatacggcgatggtttttatatgtgtttgatctaacgaggaagaaattcgcgcccacaattcatctctagatatgtatttaatatcaaacggtaacacatcaatttcgggacgcgtatatgtttctaaatttttaatccaaatataatgatgacctatatgccctattatcatactgtcaactatagtacacctagagaacttacgatacatctgtttcctataatcgttaaattttacaaatctataacatgctaaaccttttgacgacaaccattcattaatttctgatatggaatctgtattctcaataccgtatcgttctaaagccagtgctatatctccctgttcgtgagaacgctttcgtataatatcgatcaacggataatctgaagtttttggagaataatatgactcatgatctatttcgtccataaacaatctagacataggaattggaggcgatgatcttaattttgtgcaatgagtcgtcaatcctataacttctaatattgtaatattcatcatcgacataacactatctatgttatcatcgtatattagtataccatgaccttcttcatttcgtgccaaaatgatatacagtcttaaatagttacgcaatatctcaatagtttcataattgttagctgttttcatcaaggtttgtatcctgtttaacatgatggcgttctatacgtttctattttttaaatttttaacgatttactgtggctagatacccaatctctctcaaatatttttttagcctcgcttacaagctgtttatctatactattaaaactgacgaatccgtgattttggtaatgggttccgtcgaaatttgccgaagtgatatgaacatattcgtcgtcgactatcaacaattttgtattattctgaatagtgaaaaccttcacagatagatcattttgaacacacaacgcgtctagacttctggcggttgccatagaatatacgtcgttcttatcccaattaccaactagaagtctgatcttaactcctctattaatggctgcttctataatggagttgtaaatgtcgggccaatagtagctattaccgtcgacacgtgtagtgggaactatggccaaatgttcaatatctatactagtcttagccgacttgagtttatcaataactacatcagtgtctagatctctagaatatcccaataggtgttccggagaatcagtaaagaacactccacctataggattcttaatatgatacgcagtgctaactggcagacaacaagccgcagagcataaattcaaccatgaattttttgcgctattaaaggctttaaaagtatcaaatcttctacgaagatctgtggccagcgggggataatcagaatatacacctaacgttttaatcgtatgtatagatcctccagtaaatgacgcgtttcctacataacatctttcattatctgacacccaaaaacaaccgagtagtagtcccacattattttttttatctatattaacggttataaaatttatatccgggcagtgactttgtagctctcccagatttcttttccctcgttcatctagcaaaactattattttaatccctttttcagatgcctcttttagtttatcaaaaataagcgctcccctagtcgtactcagaggattacaacaaaaagatgctatgtatatatatttcttagctagagtgataatttcgttaaaacattcaaatgttgttaaatgatcggatctaaaatccatattttctggtagtgtttctaccagcctacattttgctcccgcaggtaccggtgcaaatggccacatttagttaacataaaaacttatacatcctgttctatcaacgattctagaatatcatcggctatatcgctaaaattttcatcaaagtcgacatcacaacctaactcagtcaatatattaagaagttccatgatgtcatcttcgtctatttctatatccgtatccattgtagattgttgaccgattatcgagtttaaatcattactaatactcaatccttcagaatacaatctgtgtttcattgtaaatttataggcggtgtatttaagttggtagattttcaattatgtatcaatatagcaacagtagttcttgctcctccttgattctagcatcctcttcattattttcttctacgtacataaacatgtccaatacgttagacaacacaccgacgatggcggccgccacagacacgaatatgactaaaccgatgaccatttaaaaacccctctctagctttcacttaaactgtatcgattattcttttagaacatgtataatataaaaacattattctatttcgaatttaggcttccaaaaatttttcatccgtaaaccgataataatatatatagacttgttaatagtcggaataaatagattaatgcttaaactatcatcatctccacgattagagatacaatatttacattttttttgctgtttcgaaactttatcaatacacgttaatacaaacccaggaaggagatattgaaactgaggctgttgaaaatgaaacggtgaatacaataattcagataatgtaaaatcatgattccgtattctgatgatattagaactgctaatggatgtcgatggtatgtatctaggagtatctattttaacaaagcatcgatttgctaatatacaattatcattttgattaattgttattttattcatattcttaaaaggtttcatatttatcaattcttctacattaaaaatttccatttttaatttatgtagccccgcaatactcctcattacgtttcattttttgtctataatatccattttgttcatctcggtacatagattatccaattgagaagcgcatttagtagttttgtacattttaagtttattgacgaatcgtcgaaaactagttatagttaacattttattatttgataccctgatattaatacccctgccgttactattatttataactgatgtaatccacgtaacattggaattaactatcgatagtaatgcatcgacgcttccaaaattgtctattataaactcaccgataatttttttattacatgttttcatattcattaggattattaaatctttaatcttactacgattgtatgcgttgatattgcaagacgtcattctaaaagacggaggatctccatcaaatgccagacaatcacgtacaaagtacatggaaataggttttgttctattgcgcatcatagatttatatagaacacccgtagaaatactaatttgttttactctataaaatactaatgcatctatttcatcgttttgtataacgtctttccaagtgtcaaattccaaatttttttcattgatagtaccaaattcttctatctctttaactacttgcatagataggtaattacagtgatgcctacatgccgttttttgaaactgaatagatgcgtctagaagcgatgctacgctagtcacaatcaccactttcatatttagaatatatatatgtaaaaatatagtagaatttcattttgttttttttctatgctataaatgaattctcattttgcatctgctcatactccgttttatatcaataccaaagaaggaagatatctggttctaaaagccgttaaagtatgcgatgttagaactgtagaatgcgaaggaagtaaagcttcctgcgtactcaaagtagataaaccctcatcacccgcgtgtgagagaagaccttcgtccccttccagatgcgagagaatgaataacccaggaaaacaagttccgtttatgaggacggacatgctacaaaatatgttcgcggctaatcgcgataatgtagcttctagacttttgtcctaaaatacaattatatccttttcgatattaataaatccgtgtcgtccaggttttttatctctttcagtatgtgaatagataggtattttatctctattcatcatcgaatttaagagatccgataaacattgtttgtattctccagatgtcagcatctgatacaacaatatatgtgcacataaacctctggcacttatttcatgtaccttccccttatcactaaggagaatagtatttgagaaatatgtatacatgatattatcatgaattagatatacagaatttgtaacactctcgaaatcacacgatgtgtcggcgttaagatctaatatatcactcgataacacattttcatctagatacactagacattttttaaagctaaaatagtctttagtagtaacagtaactatgcgattattttcatcgatgatacatttcatcggcatattattacgcttaccatcaaagactataccatgtgtatatctaacgtattctagcatggttgccatacgcgcattaaacttttcaggatctttggatagatcttccaatctatctatttgagaaaacatttttatcatgttcaatagttgaaacgtcggatccactatatagatattatctataaagattttaggaactacgttcatggtatcctggcgaatattaaaactatcaatgatatgattatcgttttcatcttttatcaccatatagtttctaagatatgggattttacttaatataatattatttcccgtaataaattttattagaaatgccaaatctataagaaaagtcctcgaattagtttgaagaatatctatatcgccgtaccgtatatttggattaattagatatagagaatatgatccgtaacatatacaacttttattatggcgtctaagatattcttccatcaacttattaacatttttgactagggaagatacattatgacgtcccattacttttgccttgtctattactgcgacgttcatagaatttagcatatctcttgccaattcttccattgatgttacattataagaaattttagatgaaattacatttggagctttaatagtaagaactcctaatatgtccgtgtatgtggtcactaatacagattgtagttctataatcgtaaataatttacctatattatatgtttgagtctgtttagaaaagtagctaagtatacgatcttttatttctgatgcagatgtatcaacatcggaaaaaaatctttttttattcttttttactaaagatacaaatatgtctttgttaaaaacagttattttctgaatatttctagcttgtaattttaacatatgatattcgttcacactaggtactctgcctaaataggtttctataatctttaatgtaatattaggaaaagtattctgatcaggattcctattcattttgaggatttaaaactctgattattgtctaatatggtctcaacacaaactttttcacagagcgatagagtttttgataactcgtttttcttaagaaatataaaactactgtctccagagctcgctctatcttttattttatttaattcgatacaaactcctgatactggttcagaaagtaattcattaattttcagtcctttatagaagatatttaatatagataatacaaaatcttcagtttttgatatcgatctgattgatcctagaactagatatattaataacgtgctcattaggcagtttatggcagcttgataattagatatagtatattccagttcatatttattagataccgcattgcccagattttgatattctatgaattcctctgaaaataaatccaaaataactagacattctattttttgtggattagtgtactctcttccctctatcatgttcactactggtgtccacgatgataaatatctagagggaatataatatagtccataggatgccaatctagcaatgtcgaataactgtaattttattcttcgctcttcattatgaattgattcttgaggtataaacctaacacaaattatattattagacttttcgtatgtaatgtctttcatgttataagtttttaatcctggaatagaatctattttaatgaggcttttaaacgcagagttctccaacgagtcaaagcataatactctgttggttttcttatatacgatgttacgattttcttctttgaatggaataggtttttgaattagtttataattacaacataatagataaggaagtgtgcaaatagtacgcggaaaaaacataatagctcccctgttttcatccatggttttaagtaaatgatcactggcttctttagtcaatggatattcgaacattaaccgtttcatcatcattggacagaatccatatttcttaatgtaaagagtgatcaaatcattgtgtttattgtaccatcttgttgtaaatgtgtattcggttatcggatctgctcctttttctattaaagtatcgatgtcgatctcgtctaagaattcaactatatcgacatatttcatttgtatacacataaccattactaacgtagaatgtataggaagagatgtaacgggaacagggtttgttgattcgcaaactattctaatacataattcttctgttaatacgtcttgcacgtaatctattatagatgccaagatatctatataattattttgtaagatgatgttaactatgtgatctatataagtagtgtaataattcatgtatttcgatatatgttccaactctgtctttgtgatgtctagtttcgtaatatctatagcatcctcaaaaaatatattcgcatatattcccaagtcttcagttctatcttctaaaaaatcttcaacgtatggaatataataatctattttacctcttctgatatcattaatgatatagtttttgacactatcttctgtcaattgattcttattcactatatctaagaaacggatagcgtccctaggacgaactactgccattaatatctctattatagcttctggacataattcatctattataccagaattaatgggaactattccgtatctatctaacatagttttaagaaagtcagaatctaagacctgatgttcatatattggttcatacatgaaatgatctctattgatgatagtgactatttcattctctgaaaattggtaactcattctatatatgctttccttgttgatgaaggatagaatatactcaatagaatttgtaccaacaaactgttctcttatgaatcgtatatcatcatctgaaataatcatgtaaggcatacatttaacaattagagacttgtctcctgttatcaatatactattcttgtgataatttatgtgtgaggcaaatttgtccacgttctttaattttgttatagtagatatcaaatccaatggagctacagttcttggcttaaacagatatagtttttctggaacgaattctacaacattattataaaggactttgggtagataagtgggatgaaatcctattttaattaatgcgatagccttgtcctcgtgcagatatccaaacgcttttgtgatagtatggcattcattgtctagaaacgctctacgaatatctgtgacagatatcatctttagagaatatactagtcgcgttaatagtactacaatttgtattttttaatctatctcaataaaaaaattaatatgtatgattcaatgtataactaaactactaactgttattgataactagaatcagaatctaatgatgacgtaaccaagaagtttatctactgccaatttagctgcattatttttagcatctcgtttagattttccatctgccttatcgaatactcttccgtcgatatctacacaggcataaaatgtaggagagttactaggccccactgattcaatacgaaaagaccaatctctcttagttatttggcagtactcattaataatggtgacagggttagcatctttccaatcaataatttttttagccggaataacatcatcaaaagacttatgatcctctctcattgatttttcgcgggatacatcatctattatggcgtcagccataacatcagcatccggcttatccgcctccgttgtcataaaccaacgaggaggaatatcgtcggagctgtacaccatagcactacgttgaagatcgtacagagctttattaacttctcgcttctccatattaagttgtctagttagttgtgcagcagtagctccttcgattccaatgtttttaatagccgcacacacaatctctgcgtcagaacgctcgtcaatatagatcttagacatttttagagagaactaacacaaccagcaataaaactaatttattttatcatttttttattcatcatcctctggtggttcgtcgtttctatcgaatgtggatctgattaacccgtcatctataggtgatgctggttctggagattctggaggagatggattattatctggaagaatctctgttatttccttgttttcatgtatcgattgcgttgtaacattaagattgcgaaatgctctaaatttgggaggcttaaagtgttgtttgcaatctctacacgcatgtctaactagtggaggttcgtcagcggctctagtttgaatcatcatcggcgtagtattcctacttttacagttaggacacggtgtattgtatttctcgtcgagaacgttaaaataatcgttgtaactcacatcctttattttatctatattgtattctactcctttcttaatgcattttataccgaataagagatagcgaaggaattctttttcggtgccgctagtacccttaatcatatcacatagtgttttatattccaaatttgtggcaatagacggtttatttctatacgatagtttgtttctggaatcctttgagtattctataccaatattattctttgattcgaatttagtttcttcgatattagattttgtattacctatattcttgatgtagtactttgatgatttttccatggcccattctattaagtcttccaagttggcatcatccacatattgtgatagtaattctcggatatcagtagcggctaccgccattgatgtttgttcattggatgagtaactactaatgtatacattttccatttataacacttatgtattaactttgttcatttatattttttcattattatgttgatattaacaaaagtgaatatatatgttaataattgtattgtggttatacggctacaatttcataatgagtggaagtcagtgtccgatgatcaatgacgatagctttactctgaaaagaaagtatcaaatcgatagtgcggagtcaacaataaaaatggataagaagaggataaagtttcagaatagagccaaaatggtaaaagaaataaatcagacaataagagcagcacaaactcattacgagacattgaaactaggatacataaaatttaagagaatgattaggactactactctagaagatatagcaccatctattccaaataatcagaaaacttataaactattctcggacatttcagccatcggcaaagcatcacagaatccgagtaagatggtatatgctctgctgctttacatgtttcccaatttgtttggagatgatcatagattcattcgttatagaatgcatccaatgagtaaaatcaaacacaagatcttctctcctttcaaacttaatcttattagaatattagtggaagaaagattctataataatgaatgcagatctaataaatggagaataattggaacacaagttgataaaatgttgatagctgaatctgataaatatacaatagatgcaaggtataacctaaaacccatgtatagaatcaagggaaaatctgaagaagataccctctttatcaaacagatggtagaacaatgtgtgacatcccaggaattggtggaaaaagtgttgaagatactgtttagagatttgttcaagagtggagaatacaaagcgtacagatacgatgatgatgtagaaaatggatttattggattggatacactaaaattaaacattgttcatgatatagttgaaccatgtatgcctgttcgtaggccagtggctaagatactgtgtaaagaaatggtaaataaatactttgagaatccgctacatattattggtaaaaatcttcaagagtgcattgactttgttagtgaataggcatttcatctttctccaatactaattcaaattgttaaattaataatggatagtataaatagttattagtgataaaatagtaaaaataattattagaataagagtgtagtatcatagataactctcttctataaaaatggattttattcgtagaaagtatcttatatacacagtagaaaataatatagattttttaaaggatgatacattaagtaaagtaaacaattttaccctcaatcatgtactagctctcaagtatctagttagcaattttcctcaacacgttattactaaggatgtattagctaataccaatttttttgttttcatacatatggtacgatgttgtaaagtgtacgaagcggttttacgacacgcatttgatgcacccacgttgtacgttaaagcattgactaagaattatttatcgtttagtaacgcaatacaatcgtacaaggaaaccgtgcataaactaacacaagatgaaaaatttttagaggttgccgaatacatggacgaattaggagaacttataggcgtaaattatgacttagttcttaatccattatttcacggaggggaacccatcaaagatatggaaatcatttttttaaaactgtttaagaaaacagacttcaaagttgttaaaaaattaagtgttataagattacttatttgggcttacctaagcaagaaagatacaggcatagagtttgcggataatgatagacaagatatatacactctatttcaacaaactggtagaatagtccatagcaatctaacagaaacgtttagagattatatctttcccggagataagactagctattgggtgtggttaaacgaaagtatagctaatgatgcggatattgttcttaatagacacgccattaccatgtatgataaaattcttagttatatatactctgagataaaacaaggacgcgttaataaaaacatgcttaagttagtttatatctttgagcctgaaaaagatatcagagaacttctgctagaaatcatatatgatattcctggagatatcctatctattattgatgcaaaaaacgacgattggaaaaaatattttattagtttttataaagctaattttattaacggtaatacatttattagtgatagaacgtttaacgaggacttattcagagttgttgttcaaatagatcccgaatatttcgataatgaacgaattatgtctttattctctacgagtgctgcggacattaaacgatttgatgagttagatattaataacagttatatatctaatataatttatgaggtgaacgatatcacattagatacaatggatgatatgaagaagtgtcaaatctttaacgaggatacgtcgtattatgttaaggaatacaatacatacctgtttttgcacgagtcggatcccatggtcatagagaacggaatactaaagaaactgtcatctataaaatccaagagtagacggctgaacttgtttagcaaaaacattttaaaatattatttagacggacaattggctcgtctaggtcttgtgttagatgattataaaggagacttgttagttaaaatgataaaccatcttaagtctgtggaggatgtatccgcattcgttcgattttctacagataaaaaccctagtattcttccatcgctaatcaaaactattttagctagttataatatttccatcatcgtcttatttcaaaggtttttgagagataatctatatcatgtagaagaattcttggataaaagcatccatctaaccaagacggataagaaatatatacttcaattgataagacacggtagatcatagaacagaccaaatatattattaataatttgtatatacatagatataattatcacacatttttgataaatgggaactgctgcaacaattcagactcccaccaaattaatgaataaagaaaatgcagaaatgattttggaaaaaattgttgatcatatagttatgtatattagtgacgaatcaagtgattcagaaaataatcctgaatatattgattttcgtaacagatacgaagactatagatctctcattataaaaagtgatcacgagtttgtaaagctatgtaaaaatcatgcagagaaaagttctccagaaacgcaacaaatgattatcaaacacatatacgaacaatatcttattccagtatctgaagtactattaaaacctataatgtccatgggtgacataattacatataacggatgtaaagacaatgaatggatgctagaacaactctctaccctaaactttaacaatctccgcacatggaactcatgtagcataggcaatgtaacgcgtctgttttatacattttttagttatctgatgaaagataaactaaatatataagtataatcccattctaatactttaacctgatgtattacctgcatcttattagaatattaacctaactaaaagacataacatagttgataaaaagcggtaggatataaatattatggctgccaccgttccgcgttttgacgacgtgtacaaaaatgcacaaagaagaattctagatcaagaaacattttttagtagaggtctaagtagaccgttaatgaaaaacacatatctatttgataattacgcgtatggatggataccagaaactgcaatttggagtagtagatacgcaaacttagatgcaagtgactattatcccatttcgttgggattacttaaaaagttcgagtttctcatgtctctatataaaggtcctattcccgtatatgaagaaaaagtaaatactgaattcattgctaatggatcgttctctggtagatacgtatcatatcttcgaaagttttctgcccttccaacaaacgagtttattagttttttgttactgacttccattccaatctataatatcttgttctggtttaaaaatactcagtttgatattactaaacacacattattcagatacgtctatacagataatgccaaacacctggcgttggctaggtatatgcatcaaacaggagactataagcctttgtttagtcgtctcaaagagaattatatatttaccggtcccgttccaataagtatcaaagatatagatcaccctaatcttagtagagcaagaagtccatccgattatgagacattagctaatattagtactatattgtactttaccaagtatgatccggtattaatgtttttattgttttacgtacctgggtattcaattactacaaaaattactccagccgtagaatatctaatggataaactgaatctaacaaagagcgacgtacaactgttgtaaattattttatgcttcgtaaaatgtaggttttgaaccaaacattctttcaaagaatgagatgcataaaactttattatccaatagattgactatttcggacgtcaatcgtttaaagtaaacttcgtaaaatattctttgatcactgccgagtttaaaacttctatcgataattgtttcatatgttttaatatttacaagttttttggtccatggtacattagccggacaaatatatgcaaaataatatcgttctccaagttctatagtttctggattatttttattatattcagtaaccaaatacatattagggttatctgcggatttataatttgagtgatgcattcgactcaacataaataattctagaggagacgatctactatcaaattcggatcgtaaatctgtttctaaagaacggagaatatctatacatacctgattagaattcatccgtccttcagacaacatctcagacagtctggtcttgtatgtcttaatcatattcttatgaaacttggaaacatctcttctagtttcactagtacctttattaattctctcaggtacagattttgaattcgacgatgctgagtatttcatcgttgtatatttcttcttcgattgcataatcagattcttatataccgcctcaaactctattttaaaattattaaacaatactctattattaatcagtcgttctaactctttcgctatttctatagacttatcgacatcttgactgtctatctctgtaaacacggagtcggtatctccatacacgctacgaaaacgaaatctgtaatctataggcaacgatgttttcacaatcggattaatatctctatcgtccatataaaatggattacttaatggattggcaaaccgtaacataccgttagataactctgctccatttagtaccgattctagatacaagatcattctacgtcctatggatgtgcaactcttagccgaagcgtatgagtatagagcactatttctaaatcccatcagaccatatactgagttggctactatcttgtacgtatattgcatggaatcatagatggccttttcagttgaactggtagcctgttttagcatctttttatatctggctctctctgccaaaaatgttcttaatagtctaggaatggttccttctatcgatctatcgaaaattgctatttcagagatgaggttcggtagtctaggttcacaatgaaccgtaatatatctaggaggtggatatttctgaagcaagagctgattatttatttcttcttccaatctattggtactaacaacgacaccgactaatgtttccggagatagatttccaaagatacacacattaggatacagactgttataatcaaagattaatacattattactaaacattttttgttttggagcaaataccttaccgccttcataaggaaacttttgttttgtttctgatctaactaagatagttttagtttccaacaatagctttaacagtggacccttgatgactgtactcgctctatattcgaataccatggattgaggaagcacatatgttgacgcacccgcgtctgtttttgtttctactccataatactcccacaaatactgacacaaacaagcatcatgaatacagtatctagccatatctaaagctatgtttagattataatccttatacatctgagctaaatcaacgtcatcctttccgaaagataatttatatgtatcattaggtaaagtaggacatgatagtacgactttaaatccattttcccaaatatctttacgaattactttacatataatatcctcatcaacagtcacataattacctgtggttaaaacctttgcaaatgcagcggctttgcctttcgcgtccgtagtatcgtcaccgatgaacgtcatttctctaactcctctatttaatactttacccatgcaactgaacgcgttcttggatatagaatccaatttgtacgaatccaatttttcagatttttgaatgaatgaatatagatcgaaaaatatagttccattattgttattaacgtgaaacgtagtattggccatgccgcctactcccttatgactagactgatttctctcataaatacagagatgtacagcttcctttttgtccggagatctaaagataatcttctctcctgttaataactctagacgattagtaatatatctcagatcaaagttatgtccgttaaaggtaacgacgtagtcgaacgttagttccaacaattgtttagctattcgtaacaaaactatttcagaacatagaactagttctcgttcgtaatccatttccattagtgactgtatcctcaaacatcctctatcgacggcttcttgtatttcctgttccgttaacatctcttcattaatgagcgtaaacaataatcgtttaccacttaaatcgatataacagtaacttgtatgcgagattgggttaataaatacagaaggaaacttcttatcgaagtgacactctatatctagaaataagtacgatcttgggatatcgaatctaggtatttttttagcgaaacagttacgtggatcgtcacaatgataacatccattgttaatctttgtcaaatattgctcgtccaacgagtaacatccgtctggagatatcccgttagaaatataaaaccaactaatattgagaaattcatccatggtggcattttgtatgctgcgtttctttggctcttctatcaaccacatatctgcgacggagcattttctatctttaatatctagattataacttattgtctcgtcaatgtctatagttctcatctttcccaacggcctcgcattaaatggaggaggagacaatgactgatatatttcgtccgtaactacgtaataaaagtaatgaggaaatcgtataaatacggtctcgccatttcgacatctggatttcagatataaaaatctgttttcaccgtgactttcaaaccaattaatgcaccgaacatccatttatagaatttagaaatatattttcatttaaatgaatcccaaacattggggaagagccgtatggaccattatttttatagtactttcgcaagcgggtttagacggcaacatagaagcgtgtaaacgaaaactatatactatagtcagcactcttccatgtcctgcatgtagacggcacgcgactatcgctatagaggacaataatgtcatgtctagcgatgatctgaattatatttattattttttcatcagattatttaacaatttggcatctgatcccaaatacgcgatcgatgtgacaaaggttaaccctttataaacttaacccattataaaacttatgattagtcacgactgaaataaccgcgtgattattttttggtataattctacacggcatggtttctgtaactatgaattcaacccccgttacattagtgaaatctttaacaaacagcaagggttcgtcaaagacataaaactcattgtttacaatcgaaatagaccccctatcacacttaaaataaaaaatatccttatcctttaccaccaaataaaattctgattggtcaatgtgaatgtattcacttaacagttccacaaatttatttattaactccgaggcacatacatcgtcggtattttttatggcaaactttactcttccagcatccgtttctaaaaaaatattaacgagttccatttatatcatccaatattattgaaatgacgttgatggacagatgatacaaataagaaggtacggtacctttgtccaccatctcctccaattcatgctctattttgtcattaactttaatgtatgaaaacagtacgccacatgcttccatgacagtgtgtaacactttggatacaaaatgtttgacattagtataattgtccaagactgtcaatctataatagatagtagctataatatattctatgatggtattgaagaagatgacaatcttggcatattgatcatttaacacagacatggtatcaacagatagcttgaatgaaagagaatcagtaattggaataagcgtcttctcgatagagtgtccgtataccaacatgtctgatattttgatgtattccattaaattatttagttttttctttttattctcgttaaacagcatttctgtcaacggaccccaacatcgttgaccgattaagttttgattgatttttccgtgtaaggcgtatctagtcagatcgtatagcctatccaataatccatcatctgtgcgtagatcacatcgtacactttttaattctctatagaagagcgacagacagcaatttctttattctctacagatgtaagatacttgaagacattcctatgatgatgcagaattttggataacacggtattgatggtatctgttaccataattcctttgatggctgatagtgtcagagcacaagatttccaatctttgttttgatatctatatcagacagcatggtgcgtctgacaacacaaggattaagacggaaagatgaaatgattctctcaacatcttcaatggataccttgctattttttctggcattatctatatgtgcgagaatatcctctagagaatcagtatcctttttgatgatagtggatctcaatgacatgggacgtctaaaccttcttattctatcaccagattgcatggtgatttgtcttctttcttttatcataatgtaatctctaaattcatcggcaaattgtctatatctaaaatcataatatgagatgtttacctctacaaatatctgttcgtccaatgttagagtatctacatcagttttgtattccaaattaaacatggcaacggatttaattttatattcctctattaagtcctcgtcgataataacagaatgtagataatcatttaatccatcgtacatggttggaagatgcttgttgacaaaatctttaattgtcttgatgaaggtgggactatatctaacatcttgattaataaaatttataacattgtccataggatactttgtaactagttttatacacatctcttcatcggtaagtttagacagaatatcgtgaacaggtggtatattatattcatcagatatacgaagaacaatgtccaaatctatattgtttaatatattatatagatgtagcgtagctcctacaggaatatctttaactaagtcaatgatttcatcaaccgttagatctattttaaagttaatcatataggcattgatttttaaaaggtatgtagccttgactacattctcattaattaaccattccaagtcactgtgtgtaagaagattatattctatcataagcttgactacatttggtcccgataccattaaagaattcttatgatataaggaaacagattttaggtactcatctactctacaagaattttggagagccttaacgatatcagtgacgtttattatttcaggaggaaagaatctaacattgagaatatcggaattaatagcttccagatacagtgattttggcaatagtccgtgtaatccataatccagtaacacgagctggtgcttgctagacaccttttcaatgtttaatttttttgaaataagctttgataaagccttcctcgcaaattccggatacatgaacatgtcggcgacatgattaagtattgttttttcattattttctcaacaagttctcaataccccaatagatgatagaatatcacccaatgcgtccatgttgtctatttccaacaggtcgctatatccaccaatagaagtttttccaaaaaagattctaggaacagttctaccaccagtaatttgttcaaaatagtcacgcaattcattttcgggtttaaattctttaatatcgacaatttcatacgctcctcttttgaaactaaacttatttagaatatccagtgcatttctacaaaaaggacatgtatacttgacaaaaattgtcactttgttattggccaacctttgttgtacaaattcctcggccattttaatatttaagtgatataaaactatctcgacttatttaactctttagtcgagatatatggacgcagatagctatatgatagccaactacagaaggcaaacgctataaaaaacataattacgacgagcatatttataaatatttttattcagcattacttgatatagtaatattaggcacagtcaaacattcaaccactctcgatacattaactctctcattttctttaacaaattctacaatatcttcgtaaaaagattcttgaaactttttagaatatctatcgactctagatgaaatagcgttcgtcaacatactatgttttgtatacataaaggcgcccattttaacagtttctagtgacaaaatgctagcgatcctaggatcctttagaatcacatagattgacgattcgtctctcttagtaactctagtaaaataatcatacaatctagtacgcgaaataatattatccttgacttgaggagatctaaacaatctagttttgagaacatcgataagttcatcgggaatgacatacatactatctttaatagaactcttttcatccagttgaatggattcgtccttaaccaactgattaatgagatcttctattttatcattttccagatgatatgtatgtccattaaagttaaattgtgtagcgcttctttttagtctagcagccaatactttaacatcactaatatcgatatacaaaggagatgatttatctatggtattaagaattcgtttttcgacatctgtcaaaaccaattcctttttgcctgtatcatccagttttccatcctttgtaaagaaattattttctactagactattaataagactgataaggattcctccataattgcacaatccaaactttttaacaaaactagactttacaagatctacaggaatgcgtaattcaggtttcttagcttgtgattttttcttttgtggacattttcttgtgaccaactcatctaccatttcattgattttagcagtgaaataagctttcaatgcacgggcactgatactattgaaaacgagttgatcttcaaattccgccatttaagttcaccaaacaacttttaaatacaaatatatcaatagtagtagaataagaactataaaaaaaataataattaaccaataccaaccccaacaaccggtattattagttgatgtgactgttttctcatcacttagaacagatttaacaatttctataaagtctgtcaaatcatcttccggagaccccataaatacaccaaatatagcggcgtacaacttatccatttatacattgaatattggcttttctttatcgctatcttcatcatattcatcatcaatatcaacaagtcccagattacgagccagatcttcttctacattttcagtcattgatacacgttcactatctccagagagtccgataacgttagccaccacttctctatcaatgattagtttcttgagtgcgaatgtaatttttgtttccgttccggatctatagaagacgataggtgtgataattgccttggccaattgtctttctcttttactgagtgattctagttcaccttctatagatctgagaatggatgattctccagtcgaaacatattctaccatggatccgtttaatttgttgatgaagatggattcatccttaaatgttttctctgtaatagtttccaccgaaagactatgcaaagaatttggaatgcgttccttgtgcttaatgtttccatagacggcttctagaagttgatacaacataggactagccgcggtaacttttatttttagaaagtatccatcgcttctatcttgtttagatttatttttataaagtttagtctctccttccaacataataaaagtggaagtcatttgactagataaactatcagtaagttttatagagatagacgaacaattagcgtattgagaagcatttagtgtaacgtattcgatacattttgcattagatttactaatcgattttgcatactctataacacccgcacaagtctgtagagaatcgctagatgcagtaggtcttggtgaagtttcaactctcttcttgattaccttactcatgattaaacctaaataattgtactttgtaatataatgatatatattttcactttatctcatttgagaataaaaatgtttttgtttaaccactgcatgatgtacagatttcggaatcgcaaaccaccagtggttttattttatccttgtccaatgtgaattgaatgggagcggatgcgggtttcgtacgtagatagtacattcccgtttttagaccgagactccatccgtaaaaatgcatactcgttagtttggaataactcggatctgctatatggatattcatagattgactttgatcgatgaaggctcccctgtctgcagccatttttatgatcgtcttttgtggaatttcccaaatagttttataaactcgcttaatatcttctggaaggtttgtattctgaatggatccaccatctgccataatcctattcttgatctcatcattccataattttctctcggttaaaactctaaggagatgcggattaactacttgaaattctccagacaatactctccgagtgtaaatattactggtatacggttccaccgactcattatttcccaaaatttgagcagttgatgcagtcggcataggtgccaccaataaactatttctaagaccgtatgttctgattttatcttttagaggttcccaattccaaagatccgacggtacaacattccaaagatcatattgtagaataccgttactggcgtacgatcctacatatgtatcgtatggtccttccttctcagctagttcacaactcgcctctaatgcaccgtaataaatggtttcgaagatcttcttatttagatcttgtgcttccaggctatcaaatggataatttaagagaataaacgcgtccgctaatccttgaacaccaataccgataggtctatgtctcttattagagatttcagcttctggaataggataataattaatatctataattttattgagatttctgacaattactttgaccacatccttcagtttgagaaaatcaaatcgcccatctattacaaacatgttcaaggcaacagatgccagattacaaacggctacctcattagcatccgcatattgtattatctcagtgcaaagattactacacttgatagttcctaaattttgttgattactctttttgttacacgcatccttataaagaatgaatggagtaccagtttcaatctgagattctataatcgctttccagacgactcgagcctttattatagatttgtatctcctttctctttcgtatagtgtatacaatcgttcgaactcgtctccccaaacattgtccaatccaggacattcatccggacacatcaacgaccactctccgtcatccttcactcgtttcataaagagatcaggaatccaaagagctataaatagatctctggttctatgttcctcgtttcctgtattctttttaagatcgaggaacgccataatatcagaatgccacggttccaagtatatggccataactccaggccgtttgtttcctccctgatctatgtatctagcggtgttattataaactctcaacattggaataataccgtttgatataccattggtaccggagatatagcttccactggcacgaatattactaattgatagacctattccccctgccattttagagattaatgcgcatcgttttaacgtgtcatagataccctctatgctatcatcgatcatgttaagtagaaaacagctagacatttggtgacgactagttcccgcattaaataaggtaggagaagcgtgcgtaaaccatttttcagaaagtagattgtacgtctcaatagctgagtctatatcccattgatgaattcctactgcgacacgcattaacatgtgctgaggtctttcaacgatcttgttgtttattttcaacaagtaggatttttccaaagttttaaaaccaaaatagttgtatgaaaagtctcgttcgtaaataataaccgagttgagtttatccttatatttgttaactatatccatggtgatacttgaaataatcggagaatgtttcccatttttaggattaacatagttgaataaatcctccatcacttcactaaatagtttttttgtttccttgtgtagatttgatacggctattctggcggctagaatggcataatccggatgttgtgtagtacaagtggctgctatttcggctgccagagtgtccaattctaccgttgttactccattatatattccttgaataaccttcatagctattttaataggatctatatgatccgtgtttaagccataacataattttctaatacgagacgtgattttatcaaacatgacattttccttgtatccatttcgtttaatgacaaacatttttgttggtgtaataaaaaaaattatttaacttttcattaatagggatttgacgtatgtagcgtacaaaattatcgttcctggtatatagataaagagtcctatatatttgaaaatcgttacggctcgattaaactttaatgattgcatagtgaatatatcattaggatttaactccttgactatcatggcggcgccagaaattaccatcaaaagcattaatacagttatgccgatcgcagttagaacggttatagcatccaccatttatatctaaaaattagatcaaagaatatgtgacaaagtcctagttgtatactgagaattgacgaaacaatgtttcttacatattttttttttattagtaaccgacttaatagtaggaactggaaaactagacttgattattctataagtatagatacccttccaaataatattctctttgataaaagttccagaaaatgtagaattttttaaaaagttatcttttgctattaccaagattgtgtttagacgcttattattaatatgagtgatgaaatccacaccgcctctagatatcgcttttatttccacattagatggtaaatccaatagtgaaactatctttttaggaatgtatggactcgcgtttagaggagtgaacgtcttaggcgtcggaaaggatgattcatcaaacgaataaacaatttcacaaatggatgttaatgtattagtaggaaattttttgacgctagtggaattgaagattctaatggatgatgttctacctatttcatccgataacatgttaatttccgacaccaacggttttaatatttcgatgatatacggtagtctctctttcggacttatatagcttattccacaatacgagtcattatatactccaaaaaacaaaataactagtataaaatctgtatcgaatgggaaaaacgaaattatcgacataggtatagaatctggaacattgaacgtattaatacttaattctttttctgtggtaagtaccgataggttattgacattgtatggttttaaatattctataacttgagacttgatagatattagtgatgaattgaaaattatttttatcaccacgtgtgtttcaggatcatcgtcgacgcccgtcaaccaaccgaatggagtaaaataaatatcattaatatatgctctagatattagtatttttatcaatcctttgattatcatcttctcgtaggcgaatgattccatgatcaagagtgatttaagaacatcctccggagtattaatgggcttagtaaacagtccatcgttgcaataataaaagttatccaagttaaaggatattatgcattcgtttaaagatatcacctcatctgacggagacaattttttggtaggttttagagactttgaagctacttgtttaacaaagttattcatcgtcgtttactattctatttaattttgtagttaatttatcacatatcacattaattgactttttggtccatttttccatacgtttatattcttttaatcctgcgttatccgtttccgttatatccagggatagatcttgcaagttaaatagaatgctcttaaataatgtcattttcttatccgctaaaaatttaaagaatgtataaacctttttcagagatttgaaactcttaggtggtgtcctagtacacaatatcataaacaaactaataaacattccacattcagattccaacagctgattaacttctacattaatacagcctattttcgctccaaatgtacattcgaaaaatctgaataaaacatcgatgtcacaatttgtattatccaatacagaatgtttgtgattcgtgttaaaaccatcggagaaggaataaaaataaaaattattatagtggtggaattcagttggaatattgcctccggagtcataaaaggatactaaacattgttttttatcataaattacacatttccaatgagacaaataacaaaatccaaacattacaaatctagaggtagaacttttaattttgtctttaagtatatacgataagatatgtttattcataaacgcgtcaaatttttcatgaatcgctaaggagtttaagaatctcatgtcaaattgtcctatataatccacttcggatccataagcaaactgagagactaagttcttaatacttcgattgctcatccaggctcctctctcaggctctattttcatcttgacgacctttggattttcaccagtatgtattcctttacgtgataaatcatcgattttcaaatccatttgtgagaagtctatcgccttagatactttttcccgtagtcgaggtttaaagaaatacgctaacggtatactagtaggtaactcaaagacatcatatatagaatggtaacgcgtctttaactcgtcggttaactctttcttttgatcgagttcgtcgctactattgggtctgctcaggtgccccgactctactagttccaacatcataccgataggaatacaagacactttgccggcggttgtagatttatcatatttctccactacatatccgttacaatttgttaaaaatttagatacatctatattgctacataatccagctagtgaatatatatgacataataaattggtaaatcctagttctggtattttactaattactaaatctgtatatctttccatttatcatggaaaagaatttaccagatatcttcttttttccaaactgcgttaatgtattctcttacaaatattcacaagatgaattcagtaatatgagtaaaacggaacgtgatagtttctcattggcggtgtttccagttataaaacatagatggcataacgcacacgttgtaaaacataaaggaatatacaaagttagtacagaagcacgtggaaaaaaagtatctcctccatcactaggaaaacccgcacacataaacctaaccgcgaagcaatatatatacagtgaacacacaataagctttgaatgttatagttttctaaaatgtataacaaatacagaaatcaattcgttcgatgagtatatattaagaggactattagaagctggtaatagtttacagatattttccaattccgtaggtaaacgaacagatactataggtgtactagggaataagtatccatttagcaaaattccattggcctcattaactcctaaagcacaacgagagatattttcagcgtggatttctcatagacctgtagttttaactggaggaactggagtgggtaagacgtcacaggtacccaagttattgctttggtttaattatttatttggtggattctctactctagataaaatcactgactttcacgaaagaccagtcattctatctcttcctaggatagctttagttagattgcatagcaataccattttaaaatcattgggatttaaggtactagatggatctcctatttctttacggtacggatctataccggaagaattaataaacaaacaaccaaaaaaatatggaattgtattttctacccataagttatctctaacaaaactatttagttatggcactcttattatagacgaagttcatgagcatgatcaaataggagatattattatagcagtagcgagaaagcatcatacgaaaatagattctatgtttttaatgactgccacgttagaggatgacagggaacggctaaaagtatttttacctaatcccgcatttatacatattcctggagatacactgtttaaaattagcgaggtatttattcataataagataaatccatcttccagaatggcatacatagaagaagaaaagagaaatttagttactgctatacagatgtatactcctcctgatggatcatccggtatagtctttgtggcatccgttgcacagtgtcacgaatataaatcatatttagaaaaaagattaccgtatgatatgtatattattcatggtaaggtcttagatatagacgaaatattagaaaaagtgtattcatcacctaatgtatcgataattatttctactccttatttggaatccagcgttactatacgcaatgttacacacatttatgatatgggtagagtttttgtccccgctccttttggaggatcgcaagaatttatttctaaatctatgagagatcaacgaaaaggaagagtaggaagagttaatcctgggacatacgtatatttctatgatctgtcttatatgaagtctatacagcgaatagattcagaatttctacataattatatattgtacgctaataagtttaatctaacactccccgaagatttgtttataatccctacaaatttggatattctatggcgtacaaaggaatatatagactcgttcgatattagtacagaaacatggaataaattattatccaattattatatgaagatgatagagtatgctaaactttatgtactaagtcctattctcgctgaggagttggataattttgagaggacgggagaattaactagtattgtacaagaagccattttatctctaaatttacgaattaagattttaaattttaaacataaagatgatgatacgtatatacacttttgtaaaatattattcggtgtctataacggaacaaacgctactatatattatcatagacctctaacgggatatatgaatatgatttcagatactatatttgttcctgtagataataactaaaaatcaaactctaatgaccacatctttttttagagatgaaaaattttccacatctccttttgtagacacgactaaacattttgcagaaaaaagtttattagtgtttagataatcgtatacttcatcagtgtagatagtaaatgtgaacagataaaaggtattcttgctcaatagattggtaaattccatagaatatattaatcctttcttcttgagatcccacatcatttcaaccagagacgttttatccaatgatttacctcgtactataccacatacaaaactagattttgcagtgacgtcgtatctggtattcctaccaaacaaaattttacttttagttcttttagaaaattctaaggtagaatctctatttgccaatatgtcatctatggaattaccactagcaaaaaatgatagaaatatatattgatacatcgcagctggttttgatctactatactttaaaaacgaatcagattccataattgcctgtatatcatcagctgaaaaactatgttttacacgtattccttcggcatttctttttaatgatatatcttgtttagacaatgataaagttatcatgtccatgagagacgcgtctccgtatcgtataaatatttcattagatgttagacgcttcattaggggtatacttctataaggtttcttaatcagtccatcattggttgcgtcaagaactactatcggatgttgttgggtatctctagtgttacacatggccttactaaagtttgggtaaataactatgatatctctattaattatagatgcatatatttcatttgtcaaggatattagtatcgacttgctatcgtcattaatacgtgtaatgtaatcatataaatcatgcgatagccaaggaaaatttaaatagatgttcatcatataatcgtcgctataattcatattaatacgttgacattgactaatttgtaatatagcctcgccacgaagaaagctctcgtattcagtttcatcgataaaggataccgttaaatataactggttgccgatagtctcatagtctattaagtggtaagtttcgtacaaatacagaatccctaaaatattatctaatgttggattaatctttaccataactgtataaaatggagacggagtcataactattttaccgtttgtacttactggaatagacgaaggaataatctccggacatgctggtaaagacccaaatgtctgtttgaagaaatccaatgttccaggtcctaatctcttaacaaaaattacgatattcgatcccgatatcctttgcattctatttaccagcatatcacgaactatattaagattatctatcatgtctattctcccaccgttatataaatcgcctccgctaagaaacgttagtatatccatacaatggaatacttcatttctaaaatagtattcgttttctaattctttaatgtgaaatcgtatactagaaagggaaaaattatctttgagttttccgttagaaaagaaccacgaaactaatgttctgattgcgtccgattccgttgctgaattaatggatttacaccaaaaactcatataacttctagatgtagaagcattcgctaaaaaattagtagaatcaaaggatataagtagatgttccaacaagtgagcaattcccaagatttcatctatatcattctcgaatccgaaattagaaattcccaagtagatatcctttttcatccgatcgttgatgaaaatacgaactttattcggtaagacaatcatttactaaggagtaaaataggaagtaatgttcgtatgtcgttatcatcgtataaattaaaggtgtgttttttaccattaagtgacattataattttaccaatattggaattataatataggtgtatttgcgcactcgcgacggttgatgcatcggtaaatatagctgtatctaatgttctagtcggtatttcatcatttcgctgtctaataatagcgttttctctatctgtttccattacagctgcctgaagtttattggtcggataatatgtaaaataataagaaatacatacgaataacaaaaataaaataagatataataaagatgccatttagagatctaattttgtttaacttgtccaaattcctacttacagaagatgaggaatcgttggagatagtgtcttccttatgtagaggatttgaaatatcttatgatgacttgataacttactttccagataggaaataccataaatatatttctaaagtatttgaacatgtagatttatcggaggaattaagtatggaattccatgatacaactctgagagatttagtctatcttagattgtacaagtattccaagtgtatacggccgtgttataaattaggagataatctaaaaggcatagttgttataaaggacaggaatatttatattagagaagcaaatgatgacttgatagaatatctcctcaaggaatacactcctcagatttatacatattctaatgagcgcgtccccataactggttcaaaattaattctttgtggattttctcaagttacatttatggcgtatacaacgtcgcatataacaacaaataaaaaggtagatgttctcgtttccaaaaaatgtatagatgaactagtcgatccaataaattatcaaatacttcaaaatttatttgataaaggaagcggaacaataaacaaaatactcaggaagatattttattcggtaaccggtggccaaactccataatttgctttttctatttcggattttagaatttccaaattcaccagcgatttatcggttttggtgaaatccaaggatttattaatgtccacaaatgccatttgttttgtctgtggattgtatttgaaaatggaaacgatgtagttagatagatgcgctgcaaagtttcctattagggttccgcgctttacgtcacccagcatacttgaatcaccatcctttaaaaaaaatgataagatatcaacatggagtatatcatactcggattttaattcttctactgcatcactgacattttcacaaatactacaatacggtttaccgaaaataatcagtacgttcttcatttatgggtatcaaaaacttaaaatcgttactgctggaaaataaatcactgacgatattagatgataatttatacaaagtatacaatggaatatttgtggatacaatgagtatttatatagccgtcgccaattgtgtcagaaacttagaagagttaactacggtattcataaaatacgtaaacggatgggtaaaaaagggagggcatgtaaccctttttatcgatagaggaagtataaaaattaaacaagacgttagagacaagagacgtaaatattctaaattaaccaaggacagaaaaatgctagaattagaaaagtgtacatccgaaatacaaaatgttaccggatttatggaagaagaaataaaggcagaaatgcaattaaaaatcgataaactcacatttcaaatatatttatctgattctgataacataaaaatatcattgaatgagatactaacacatttcaacaataatgagaatgttacattattttattgtgatgaacgagacgcagaattcgttatgtgtctcgaggctaaaacacatttctctaccacaggagaatggccgttgataataagtaccgatcaggatactatgctatttgcatctactgataatcatcctaagatgataaaaaacttaactcaactgtttaaatttgttccctcggcagaggataactatttagcaaaattaacggcgttagtgaatggatgtgatttctttcctggactctatggggcatctataacacccaccaacttaaacaaaatacaattgtttagtgattttacaatcgataatatagtcactagtttggcaattaaaaattattatagaaagactaactctaccgtagacgtgcgtaatattgttacgtttataaacgattacgctaatttagacgatgtctactcgtatgttcctccttgtcaatgcactgttcaagaatttatattttccgcattagatgaaaaatggaacaattttaaatcatcttatttagagaccgttccgttaccctgccaattaatgtatgcattagaaccacgcaaggagattgatgtttcagaagttaaaactttatcatcttatatagatttcgaaaatactaaatcagatatcgatgttataaaatctatatcttcgatcttcggatattctaacgaaaactgtaacactatagtgttcggcatctataaggataatttactactgagtataaatagttcattttactttaacgatagtctgttaataaccaatactaaaagtgataatataataaatataggttactagattaaaaatggtgttccaactcgtgtgctctacgtgcggcaaagatatttctcacgaacgatataaattgattatacgaaaaaaatcattaaaggatgtactcgtcagtgtaaagaacgaatgttgtaggttaaaattatctacacaaatagaacctcaacgtaacttaacagtgcaacctctattggatataaactaatatggatccggttaattttatcaagacatatgcgcctagaggttctattatttttattaattataccatgtcattaacaagtcatttgaatccatcgatagaaaaacatgtgggtatttattatggtacgttattatcggaacacttggtagttgaatctacctatagaaaaggagttcgaatagtcccattggatagtttttttgaaggatatcttagtgcaaaagtatacatgttagagaatattcaagttatgaaaatagcagctgatacgtcattaactttattgggtattccgtatggatttggtcataatagaatgtattgttttaaattggtagctgaatgttataaaaatgccggtattgatacatcgtctaaacgaatattaggtaaagatatttttctgagccaaaacttcacagatgataatagatggataaagatatatgattctaataatttaacattttggcaaattgattaccttaaagggtgagttaatatgcataactactcctccgttgttttttccctcgttctttttcttaacgttgtttgccatcactctcataatgtaaagatattctaaaatggtaaacttttgcatatcggacgcagaaattggtataaatgttgtaattgtattatttcccgtcaatggactagtcacagctccatcagttttatatcctttagagtatttctcactcgtgtctaacattctagagcattccatgatctgtttatcgttgatattggccggaaagatagattttttattttttattatattactattggcaattgtagatataacttctggtaaatatttttctaccttttcaatctcttctattttcaagccggctatatattctgctatattgttgctagtatcaataccttttctggctaagaagtcatatgtggtattcactatatcagttttaactggtagttccattagcctttccacttctgcagaataatcagaaattggttctttaccagaaaatccagctactataataggctcaccgatgatcattggcaaaatcctatattgtaccagattaatgagagcatatttcatttccaataattctgctagttcttgagacattgatttatttgatgaatctagttggttctctagatactctaccatttctgccgcatacaataacttgttagataaaatcagggttatcaaagtgtttagcgtggctagaatagtgggcttgcatgtattaaagaatgcggtagtatgagtaaaccgttttaacgaattatatagtctccagaaatctgtggcgttacatacatgagccgaatgacatcgaagattgtccaatatttttaatagctgctctttgtccattatttctatatttgactcgcaacaattgtagataccattaatcactgattcctttttcgatgccggacaatagcacaattgtttagctttggactctatgtattcagaattaatagatatatctctcaatacagattgcactatacattttgaaactatgtcaaaaattgtagaacgacgctgttctgcagccatttaactttaaataatttacaaaaatttaaaatgagcatccgtataaaaatcgataaactgcgccaaattgtggcatatttttcagagttcagtgaagaagtatctataaatgtagactcgacggatgagttaatgtatatttttgccgccttgggcggatctgtaaacatttgggccattatacctctcagtgcatcagtgttctaccgcggagccgaaaacattgtgtttaatcttcctgtgtccaaggtaaaatcgtgtttgtgtagttttcacaatgatgccatcatagatatagaacctgatctggaaaataatctagtaaaactttctagttatcatgtagtaagtgtcgattgtaacaaggaactgatgcctattaggacagatactactatttgtctaagtatagatcaaaagaaatcttacgtgtttaattttcacaagtatgaagaaaaatgttgtggtagaaccgtcattcatttagaatggttgttgggctttatcaagtgtattagtcagcatcagcatttggctattatgtttaaagatgacaatattattatgaagactcctggtaatactgatgcgttttccagggaatattctatgactgaatgttctcaagaactacaaaagttttctttcaaaatagctatctcgtctctcaacaaactacgaggattcaaaaagagagtcaatgtttttgaaactagaatcgtaatggataatgacgataacattctaggaatgttgttttcggatagagttcaatcctttaagatcaacatctttatgacgtttttagattaatactttcaatgagataaatatgggtggcagagtaagtgttgagctccctaaacgggatccgcctccgggagtacccactgatgagatgttattaaacgtggataaaatgcatgacgtgatagctcccgctaagcttttagaatatgtgcatataggaccactagcaaaagataaagaggataaagtaaagaaaagatatccagagtttagattagtcaacacaggacccggtggtctttcggcattgttaagacaatcgtataatggaaccgcacccaattgctgtcgcacttttaatcgtactcattattggaaaaaggatggaaagatatcagataagtatgaagagggtgcagtattagaatcgtgttggccagacgttcacgacactggaaaatgcgatgttgatttattcgactggtgtcagggggatacgttcgatagaaacatatgccatcagtggatcggttcagcctttaataggagtgatagaactgtagagggtcaacaatcgttaataaatctgtataataagatgcaaacattatgtagtaaagatgctagtgtaccaatatgtgaatcatttttgcatcatttacgcgcacacaatacagaagatagcaaagagatgatcgattatattctaagacaacagtctgcggactttaaacagaaatatatgagatgtagttatcccactagagataagttagaagagtcattaaaatatgcggaacctcgagaatgttgggatccagagtgttcgaatgccaatgttaatttcttactaacacgtaattataataatttaggactttgcaatattgtacgatgtaatactagcgtgaacaacttacagatggataaaacttcctcattaagattgtcatgtggattaagcaatagtgatagattttctactgttcccgtcaatagagcaaaagtagttcaacataatattaaacattcgttcgacctaaaattgcatttgatcagtttattatctctcttggtaatatggatactaattgtagctatttaaatgggtgccgcggcaagcatacagacgacggtgaatacactcagcgaacgtatctcgtctaaattagaacaagaagcgaacgctagtgctcaaacaaaatgtgatatagaaatcggaaatttttatatccgacaaaaccatggatgtaacctcactgttaaaaatatgtgctctgcggacgcggatgctcagttggatgctgtgttatcagccgctacagaaacatatagtggattaacaccggaacaaaaagcatacgtaccagctatgtttactgctgcgttaaacattcagacgagtgtaaacactgttgttagagattttgaaaattatgtgaaacagacttgtaattctagcgcggtcgtcgataacaaattaaagatacaaaacgtaatcatagatgaatgttacggagccccaggatctccaacaaatttggaatttattaatacaggatctagcaaaggaaattgtgccattaaagcgttgatgcaattgacgactaaggccactactcaaatagcacctagacaagttgctggtacaggagttcagttttatatgattgttatcggtgttataatattggcagcgttgtttatgtactatgccaagcgtatgttgttcacatccaccaatgataaaatcaaacttattttagccaataaggaaaacgtccattggactacttacatggacacattctttagaacttctccgatggttattgctaccacggatatgcaaaactgaaaatatattgataatattttaatagattaacatggaagttatcgctgatcgtctagacgatatagtgaaacaaaatatagcggatgaaaaatttgtagattttgttatacacggtctagagcatcaatgtcctgctatacttcgaccattaattaggttgtttattgatatactattatttgttatagtaatttatatttttacggtacgtctagtaagtagaaattatcaaatgttgttggcgttggtggcgctagtcatcacattaactattttttattactttatactataatagtactagactgacttctaacaaacatctcacctgccataaataaatgcttgatattaaagtcttctatttctaacactattccatctgtggaaaataatactctgacattatcgctaattgacacatcggtgagtgatatgcctataaagtaataatcttctttgggcacatataccagtgtaccaggttctaacaacctatttactggtgctcctgtagcatactttttctttaccttgagaatatccatcgtttgcttggtcaatagcgatatgtgattttttatcaaccactcaaaaaagtaattggagtgttcatatcctctacgggctattgtctcatggccgtgtatgaaatttaagtaacacgactgtggtagatttgttctatagagccggttgccgcaaatagatagaactaccaatatgtctgtacaaatgttaaacattaattgattaacagaaaaaacaatgttcgttctgggaatagaaaccagatcaaaacaaaattcgttagaatatatgccacgtttatacatggaatataaaataactacagtttgaaaaataacagtatcatttaaacatttaacttgcggggttaatttcacaactttactgtttttaaactgttcaaaatatagcatcgatccatgagaaatacgtttagccgcctttaatagaggaaatcccaccgcctttctggatctcaccaacgacgatagttctgaccagcaacttatttcttcatcatccacctgttttaacatataataggcaggagatagatatccgtcattgcaatattccttttcgtaggcacacaatctaatattgataaaatctccattctcttctctgcatttattatcttgtttcggtggctgattaggctgtagtcttggtttaggctttggtatatcgttgttgaatctattttggtcattaaatctttcatttcttcctggtatatttctatcacctcgtttggttggatttttgtctatattatcgtttgtaacatcggtacgggtattcatttatcacaaaaaaaacttctctaaatgagtctactgctagaaaacctcatcgaagaagataccatattttttgcaggaagtatatctgagtatgatgatttacaaatggttattgccggcgcaaaatccaaatttccaagatctatgctttctatttttaatatagtacctagaacgatgtcaaaatatgagttggagttgattcataacgagaatatcacaggggcaatgtttaccacaatgtataatataagaaacaatttgggtctaggagatgataaactaactattgaagccattgaaaactatttcttggatcctaacaatgaggttatgcctcttatcattaataatacggatatgactgccgtcattcctaaaaaaagtggtaggagaaagaataagaacatggttattttccgtcaaggatcatcacctatcttgtgtattttcgaaactcgtaaaaagattaatatttataaagaaaatatggaatccgcgtcgactgagtatacacctatcggagacaacaaggctttgatatctaaatatgcgggaattaatgtcctgaatgtgtattctccttccacatccatgagattgaatgccatttacggattcaccaataaaaataaactagagaaacttagtactaataaggaactagaatcgtatagttctagccctcttcaagaacccattaggttaaatgattttctgggactattggaatgtgttaaaaagaatattcctctaacagatattccgacaaaggattgattactataaatggagaatgttcctaatgtatactttaatcctgtgtttatagagcccacgtttaaacattctttattaagtgtttataaacacagattaatagttttatttgaagtattcattgtattcattctaatatatgtattttttagatctgaattaaatatgttcttcatgcctaaacgaaaaatacccgatcctattgatagattacgacgtgctaatctagcgtgtgaagacgataaattaatgatctatggattaccatggatgacaactcaaacatctgcgttatcaataaatagtaaaccgatagtgtataaagattgtgcaaagcttttgcgatcaataaatggatcacaaccagtatctcttaacgatgttcttcgcagatgatgattcattttttaagtatttggctagtcaagatgatgaatcttcattatctgatatattgcaaatcactcaatatctagactttctgttattattattgatccaatcaaaaaataaattagaagccgtgggtcattgttatgaatctctttcagaggaatacagacaattgacaaaattcacagactttcaagattttaaaaaactgtttaacaaggtccctattgttacagatggaagggtcaaacttaataaaggatatttgttcgactttgtgattagtttgatgcgattcaaaaaagaatcctctctagctaccaccgcaatagatcctattagatacatagatcctcgtcgcgatatcgcattttctaacgtgatggatatattaaagtcgaataaagtgaacaataattaattctttattgtcatcatgaacggcggacatattcagttgataatcggccccatgttttcaggtaaaagtacagaattaattagacgagttagacgttatcaaatagctcaatataaatgcgtgactataaaatattctaacgataatagatacggaacgggactatggacgcatgataagaataattttgaagcattggaagcaactaaactatgtgatgtcttggaatcaattacagatttctccgtgataggtatcgatgaaggacagttctttccagacattgttgaattctgtgagcgtatggcaaacgaaggaaaaatagttatagtagccgcactcgatgggacatttcaacgtaaaccgtttaataatattttgaatcttattccattatctgaaatggtggtaaaactaactgctgtgtgtatgaaatgctttaaggaggcttccttttctaaacgattgggtgaggaaaccgagatagagataataggaggtaatgatatgtatcaatcggtgtgtagaaagtgttacgtcggctcataatattatattttttatctaaaaaactaaaaataaacattgattaaattttaatataatacttaaaaatggatgttgtgtcgttagataaaccgtttatgtattttgaggaaattgataatgagttagattacgaaccagaaagtgcaaatgaggtcgcaaaaaaactgccgtatcaaggacagttaaaactattactaggagaattattttttcttagtaagttacagcgacacggtatattagatggtgccaccgtagtgtatataggatctgctcccggtacacatatacgttatttgagagatcatttctataatttaggagtgatcatcaaatggatgctaattgacggccgccatcatgatcctattttaaatggattgcgtgatgtgactctagtgactcggttcgttgatgaggaatatctacgatccatcaaaaaacaactgcatccttctaagattattttaatttctgatgtgagatccaaacgaggaggaaatgaacctagtacggcggatttactaagtaattacgctctacaaaatgtcatgattagtattttaaaccccgtggcgtctagtcttaaatggagatgcccgtttccagatcaatggatcaaggacttttatatcccacacggtaataaaatgttacaaccttttgctccttcatattcagctgaaatgagattattaagtatttataccggtgagaacatgagactgactcgagttaccaaatcagacgctgtaaattatgaaaaaaagatgtactaccttaataagatcgtccgtaacaaagtagttgttaactttgattatcctaatcaggaatatgactattttcacatgtactttatgctgaggaccgtgtactgcaataaaacatttcctactactaaagcaaaggtactatttctacaacaatctatatttcgtttcttaaatattccaacaacatcaactgaaaaagttagtcatgaaccaatacaacgtaaaatatctagcaaaaattctatgtctaaaaacagaaatagcaagagatccgtacgcagtaataaatagaaacgtactactgagatatactaccgatatagagtataatgatttagttactttaataaccgttagacataaaattgattctatgaaaactgtgtttcaggtatttaacgaatcatccataaattatactccggttgatgatgattatggagaaccaatcattataacatcgtatcttcaaaaaggtcataacaagtttcctgtaaattttctatacatagatgtggtaatatctgacttatttcctagctttgttagactagatactacagaaactaatatagttaatagtgtactacaaacaggcgatggtaaaaagactcttcgtcttcccaaaatgttagagacggaaatagttgtcaagattctctaccgtcctaatataccattaaaaattgttagatttttccgcaataacatggtaactggagtagagatagccgatagatctgttatttcagtcgctgattaatcaattagtagagatgagataagaacattataataatcaataatatattttatatcttatatcttgtttagaaaaatgctaatattaaaatagctaacgctagtaatccaatcggaagccatttgatatctataatagggtatctaatttcctgattcagatagcggacagctatattctcggtagctactcgtttggaatcacaaacattatttacatctaatttactatctgtaatggaaacgtttcccaatgaaatggtacaatccgatacattgcattttgttatatttttttttaaagaggctggtaacaacgcatcgcttcgtttacatggctcgtaccaacaataatagggtaatcttgtatctattcctatccgtactatgcttttatcaggataaatacatttacatcgtatatcgtctttgttagcatcacagaatgcataaatttgttcgtccgtcatgataaaaatttaaagtgtaaatataactattattttatagttgtaataaaaagggaaatttgattgtatactttcggttctttaaaagaaactgacttgataaaaatggctgtaatctctaaggttacgtatagtctatatgatcaaaaagagattaatgctacagatattatcattagtcatgttaaaaatgacgacgatatcggtaccgttaaagatggtagactaggtgctatggatggggcattatgtaaaacttgtgggaaaacggaattggaatgtttcggtcactggggtaaagtaagtatttataaaactcatatagttaagcctgaatttatttcagaaattattcgtttactgaattatatatgtattcactgcggattattgcgttcacgagaaccgtattccgacgatattaacctaaaagagttatcgggacacgctcttaggagattaaaggataaaatattatccaagaaaaagtcatgttggaacagtgaatgtatgcaaccgtatcaaaaaattactttttcaaagaaaaaggtttgtttcgtcaacaagttggatgatattaacgttcctaattctctcatctatcaaaagttaatttctattcatgaaaagttttggccattattagaaattcatcaatatccagctaacttattttatacagactactttcccatccctccgttgattattagaccggctattagtttttggatagatagtatacccaaagaaaccaatgaattaacttacttattaggtatgatcgttaagaattgtaacttgaatgctgatgaacaggttatccagaaggcggtaatagaatacgatgatattaaaattatttctaataacacttccagtatcaatttatcatatatcacatccggcaaaaataatatgattagaagttatatcgtcgcccggcgaaaagatcagaccgctagatctgtaattggtcccagtacatctatcaccgttaatgaggtaggaatgcccgcatatattagaaatacacttacagaaaagatatttgttaatgcctttacagtggataaagttaaacaactattagcgtcaaaccaagttaaattttactttaataaacgattaaaccaattaacaagaatacgccaaggaaagtttatcaaaaataaaatacatttattgcctggtgattgggtagaagtagctgttcaagaatatacaagtattatttttggaagacagccgtctctacatagatacaacgtcatcgcttcatctatcagagctaccgaaggagatactatcaaaatatctcccggaattgtcaactctcaaaatgctgatttcgacggagatgaagaatggatgatattggagcaaaatcctaaagccgtaattgaacaaagtattcttatgtatccgacgacgttactcaaacacgatattcatggagcccccgtttatggatctattcaagatgaaatcgtagcagcgtattcattgtttaggatacaagatctttgtttagatgaagtattgaacatcttggggaaatatggaagagagttcgatcctaaaggtaaatgtaaattcagcggtaaagatatctatacttacttgataggtgaaaagattaattatccgggtctcttaaaggatggtgaaattattgcaaacgacgtagatagtaattttgttgtggctatgaggcatctgtcattggctggactcttatccgatcataagtcgaacgtggaaggtatcaactttattatcaagtcatcttatgtttttaagagatatctatctatttacggttttggggtgacattcaaagatctgagaccaaattcgacgttcactaataaattggaggccatcaacgtagaaaaaatagaacttatcaaagaagcatacgccaaatatctcaacgatgtaagagacgggaaaatagttccattatctaaagctttagaggcggactatgtggaatccatgttatccaacttgacaaatcttaatatccgagagatagaagaacatatgagacaaacgctgatagatgatccagataataacctcctgaaaatggccaaagcgggttataaagtaaatcccacagaactaatgtatattctaggtacttatggacaacagaggattgatggtgaaccagcagagactcgagtattgggtagagtcttaccttactatcttccagactctaaggatccagaaggaagaggttacattcttaattctttaacaaaaggattaacgggttctcaatattacttttcgatgctggttgcaagatctcaatctactgatatcgtctgtgaaacatcacgtaccggaacactggctagaaaaatcattaaaaagatggaggatatggtggtcgacggatacggacaagtagttataggtaatacgctcatcaagtacgccgccaattataccaaaattctaggctcagtatgtaaacctgtagatcttatctatccagatgagtccatgacttggtatttggaaattagtgctctgtggaataaaataaaacagggattcgtttactctcagaaacagaaacttgcaaaaaagacattggcgccgtttaatttcctagtattcgtcaaacccaccactgaggataatgctattaaggttaaggatctgtacgatatgattcataacgtcattgatgatgtgagagagaaatacttctttacggtatctaatatagattttatggagtatatattcttgacgcatcttaatccttctagaattagaattacaaaagaaacggctatcactatctttgaaaagttctatgaaaaactcaattatactctaggtggtggaactcctattggaattatttctgcacaggtattgtctgagaagtttacacaacaagccctgtccagttttcacactactgaaaaaagtggtgccgtcaaacaaaaacttggtttcaacgagtttaataacttgactaatttgagtaagaataagaccgaaattatcactctggtatccgatgatatctctaaacttcaatctgttaagattaatttcgaatttgtatgtttgggagaattaaatccaaacatcactcttcgaaaagaaacagataggtatgtagtagatataatagtcaatagattatacatcaagagagcagaaattaccgaattagtcgtcgaatatatgattgaacgattcatctcctttagcgtcattgtaaaggaatggggtatggaaacattcattgaggatgaggataatattagatttactgtctacctaaatttcgttgaaccggaagaattgaatcttagtaagtttatgatggttcttccgggtgccgccaacaagggcaagattagtaaattcaagattcctatctctgattatacgggatatgacgacttcaatcaaacaaaaaagctcaataagatgactgtagaactcatgaatctaaaagaattgggttctttcgatttggaaaacgtcaacgtgtatcctggagtatggaatacatacgatatcttcggtatcgaggccgctcgtgaatacttgtgcgaagccatgttaaacacctatggagaagggttcgattatctgtatcagccttgtgatcttctcgctagtttactatgtgctagttacgaaccagaatcagtgaataaattcaagttcggcgcagctagtactcttaagagagctacgttcggagacaataaagcattgttaaacgcggctcttcataaaaagtcagaacctattaacgataatagtagctgccacttttttagcaaggtccctaatataggaactggatattacaaatactttatcgacttgggtcttctcatgagaatggaaaggaaactatctgataagatatcttctcaaaagatcaaggaaatggaagaaacagaagacttttaattcttatcaataacatatttttctatgatctgtcttttaaacgatggattttccacaaatgcgcctctcaagtccctcatagaatgatacacgtataaaaaatatagcataggcaatgactccttatttttagacattagatatgccaaaatcatagccccgcttctatttactcccgcagcacaatgaaccaacacgggctcgtttcgttgatcacatttagataaaaaggcggttacgtcgtcaaaatatttactaatatcggtagttgtatcatctaccaacggtatatgaataatattaatattagagttaggtaatgtatatttatccatcgtcaaatttaaaacatatttgaacttaacttcagatgatggtgcatccatagcatttttataatttcccaaatacacattattggttactcttgtcattatagtgggagatttggctttgtgcatatctccagttgaacgtagtagtaagtatttatacaaacttttcttatccatttataacgtacaaatggataaaactactttatcggtaaacgcgtgtaatttagaatacgttagagaaaaggctatagtaggcgtacaagcagccaaaacatcaacacttatattctttgttattatattggcaattagtgcgctattactctggtttcagacgtctgataatccagtctttaatgaattaacgagatatatgcgaattaaaaatacggttaacgattggaaatcattaacggatagcaaaacaaaattagaaagtgatagaggtagacttctagccgctggtaaggatgatatattcgaattcaaatgtgtggatttcggcgcctattttatagctatgcgattggataagaaaacatatctgccgcaagctattaggcgaggtactggagacgcgtggatggttaaaaaggcggcaaaggtcgatccatctgctcaacaattttgtcagtatttgataaaacacaagtctaataatgttattacttgtggtaatgagatgttaaatgaattaggttatagcggttattttatgtcaccgcattggtgttccgattttagtaatatggaatagtgttagataaatgcggtaacgaatgttcctgtaaggaaccataacagcttagatttaacgttaaagatgagcataaacataataaacaaaattacaatcaaacctataacattaatatcaaacaatccaaaaaatgaaatcagtggagtagtaaacgcgtacataactcctggataacgtttagcagctgccgttcctattctagaccaaaaattcggtttcatgttttcgaaacggtattctgcaacaagtcgaggatcgtgttctacatatttggcggcgttatccagtatctgcctattgatcttcatttcgttttcgattctggctatttcaaaataaaatcccgatgatagacctccagactttataatttcatctacgatgttcagcgccgtagtaactctaataatataggctgataagctaacatcataccctcctgtatatgtgaatatggcatgatttttgtccattacaagctcggttttaactttattgcctgtaataatttctctcatctgtaggatatctatttttttgtcatgcattgccttcaagacgggacgaagaaacgtaatatcctcaataacgttatcgttttctacaataactacatattctacctttttattttctaactcggtaaaaaaattagaatcccatagggctaaatgtctagcgatatttcttttcgtttcctctgtacacatagtgttacaaaaccctgaaaagaagtgagtatacttgtcatcatttctaatgtttcctccagtccactgtataaacgcataatccttgtaatgatctggatcatccttgactaccacaacatttcttttttctggcataacttcattgtcctttacatcatcgaacttctgatcattaatatgctcatgaacattaggaaatgtttctgatggaggtctatcaataactggcacaacaataacaggagttttcaccgccgccatttagttattgaaattaatcatatacaactctttaatacgagttatattttcgtctatccattgtttcacatttacatatttcgacaaaaagatataaaatgcgtattccaatgcttctctgtttaatgaattactaaaatatacaaacacgtcactgtctggcaataaatgatatcttagaatattgtaacaatttattttgtattgcacatgttcgtgatctatgagttcttcttcgaatggcataggatctccgaatctgaaaacgtataaataggagttagaataataatatttgagagtattggtaatatataaactctttagcggtataattagtttttttctctcgatttctatttttagatgtgatggaaaaatgactaattttgtagcattagtatcatgaactctaatcgagatcttaatatcttcgtcacacgttagttctttgaagtttttaagagatgcatcagttggttcgaccgatggagtaggtgcaacaattttttgttcgatgtatgtatgtactggagccattgtcttaactataatggtgcttgtatcgaaaaactttaatgcagataatggaagctcttcgccgcgactttctacatcgtaattgggttctaacgccgatctctgaatggatactagttttctaagttctaatgtgattctctgaaaatgtaaatccaattcctccggcattatagatgtgtatacatcggtaaataaaactatagtatccaacgatcccttctcgcaaattctagtcttaaccaaaaaatcgtatataaccacggagatggcgtatttaagagtggattcttctaccgttttgttcttggatttcatataagaaactataaagtccgcactactgttaagaatgattactaacgcaactatatagtttaaattaagcatcttggaaacataaaataactctgtagacgatacttgactttcgaataagtttgcagacaaacgaagaaagaacagacctctcttaatttcagaagaaaactttttttcgtattcctgacgtctagagtttatatcaataagaaagttaagaattagtcggttaatgttgtatttcattacccaagtttgagatttcataatattatcaaaagacatgataatattaaagataaagcgctgactatgaacgaaatagctatatggttcgctcaagaatatagtcttgttaaacgtggaaacgataactgtatttttaatcacgtcagcggcatctaaattaaatataggtatatttattccacacactctacaatatgccacaccatcttcataataaataaattcgttagcaaaattattaattttagtgaaatagttagcgtcaactttcatagcttccttcaatctaatttgatgctcacacggtgcgaattccactctaacatcccttttccatgcctcaggttcatcgatctctataatatctagttttttgcgtttcacaaacacaggctcgtctctcgcgatgagatctgtatagtaactatgtaaatgataactagatagaaagatgtagctatatagatgacgatcctttaagagaggtatgatgactttaccccaatcagatagactgttgttatggtcttcggaaaaagaatttttataaatttttccagtattttccaaatatacgtacttaacatctaaaaaatccttaatgataataggaatggataatccgtctattttataaagaaatacatatcgcacattatacttttttttggaaatgggaataccgatgtgtctacataaatatgcaaagtctaaatattttttagagaatcttagttggtccaaattcttttccaagtacggtaatagatttttcatattgaacggtatcttcttaatctctggttctagttccgcattaaatgatgaaactaagtcactatttttataactaacgattacatcacctctaacatcatcatttaccagaatactgatcttcttttgtcgtaaatacatgtctaatgtgttaaaaaaaagatcatacaagttatacgtcatttcatctgtggtattcttgtcattgaaggataaactcgtactaatctcttctttaacagcctgttcaaatttatatcctatatacgaaaaaatagcaaccagtgtttgatcatccgcgtcaatattctgttctatcgtagtgtataacaatcgtatatcttcttctgtgatagtcgatacgttataaaggttgataacgaaaatatttttatttcgtgagataaagtcatcgtaggattttggacttatattcgcgtctagtagatatgcttttatttttggaatgatctcaattagaatagtctctttagagtccatttaaagttacaaacaactaggaaattggtttatgatgtataatttttttagtttttatagattctttattctatacttaaaaaatgaaaataaatacaaaggttcttgagggttgtgttaaattgaaagcgagaaataatcataaattatttcattatcgcgatatccgttaagtttgtatcgtaatggcgtggtcaattacaaataaagcggatactagtagcttcacaaagatggctgaaatcagagctcatctaaaaaatagcgctgaaaataaagataaaaacgaggatattttcccggaagatgtaataattccatctactaagcccaaaaccaaacgagccactactcctcgtaaaccagcggctactaaaagatcaaccaaaaaggaggaagtggaagaagaagtagttatagaggaatatcatcaaacaactgaaaaaaattctccatctcctggagtcagcgacattgtagaaagcgtggctgctgtagagctcgatgatagcgacggggatgatgaacctatggtacaagttgaagctggtaaagtaaatcatagtgctagaagcgatctttctgacctaaaggtggctaccgacaatatcgttaaagatcttaagaaaattattactagaatctctgcagtatcgacggttctagaggatgttcaagcagctggtatctctagacaatttacttctatgactaaagctattacaacactatctgatctagtcaccgagggaaaatctaaagttgttcgtaaaaaagttaaaacttgtaagaagtaaatgcgtgcacttttttataaagatggtaaactctttaccgataataattttttaaatcctgtatcagacgataatccagcgtatgaggttttgcaacatgttaaaattcctactcatttaacagatgtagtagtatatgaacaaacgtgggaggaggcgttaactagattaatttttgtgggaagtgattcaaaaggacgtagacaatacttttacggaaaaatgcatgtacagaatcgcaacgctaaaagagatcgtatttttgttagagtatataacgttatgaaacgaattaattgttttataaacaaaaatataaagaaatcgtccacagattccaattatcagttggcggtttttatgttaatggaaactatgttttttattagatttggtaaaatgaaatatcttaaggagaatgaaacagtagggttattaacactaaaaaataaacacatagaaataagtcccgatgaaatagttatcaagtttgtaggaaaggacaaagtttcacatgaatttgttgttcataagtctaatagactatataaaccgctattgaaactgacggatgattctagtcccgaagaatttctgttcaacaaactaagtgaacgaaaggtatacgaatgtatcaaacagtttggtattagaatcaaggatctccgaacgtatggagtcaattatacgtttttatataatttttggacaaatgtaaagtccatatctcctcttccgtcaccaaaaaagttaatagcgttaactatcaaacaaactgctgaagtggtaggtcatactccatcaatttcaaaaagagcttatatggcaacgactattttagaaatggtaaaggataaaaattttttagatgtagtatctaaaactacgttcgatgaattcctatctatagtcgtagatcacgttaaatcatctacggatggatgatatagatctttacacaaataattacaagaccgataaatggaaatggataagcgtatgaaatctctcgcaatgacagctttcttcggagagctaaacacattagatattatggcattgataatgtctatatttaaacgccatccaaacaataccattttttcagtggataaggatggtcagtttatgattgatttcgaatacgataattataaggcttctcaatatttggatctgaccctcactccgatatctggagatgaatgcaagactcacgcatcgagtatagccgaacaattggcgtgtgtggatattattaaagaggatattagcgaatatatcaaaactactccccgtcttaaacgatttataaaaaaataccgcaatagatcagatactcgtatcagtcgagatacagaaaagcttaaaatagctctagctaaaggcatagattacgaatatataaaagacgcttgttaataagtaaatgaaaaaaaactagtcgtttataataaaacacaatatggatgccaacatagtatcatcttctactattgcaacgtatatagacgctttagcgaagaatgcttcagaattagaacagaggtctaccgcatacgaaataaataatgaattggaactagtatttattaagccgccattaattactttgacaaatgtagtgaatatctctacgattcaggaatcgtttattcgatttaccgttactaataaggaaggtgttaaaattagaactaagattccattatctaaggtacatggtctagatgtaaaaaatgtacagttagtagatgctatagataacatagtttgggaaaagaaatcattagtgacggaaaatcgtcttcacaaagaatgcttgttgagactatcgacagaggaacgtcatatatttttggattacaagaaatatggatcctctatccgactagaattagtcaatcttattcaagcaaaaacaaaaaactttacgatagactttaagctaaaatattttctaggatccggtgcccagtctaaaagttctttattacacgctattaatcatccaaagtcaaggcctaatacatctctggaaatagaattcacacctagagacaatgaaaaagttccatatgatgaactaataaaggaattgacgactctatcacgtcatatatttatggcttctccagagaatgtaattctttctccgcctattaacgcgcctataaaaacctttatgttgcctaaacaagatatagtaggtttggatctggaaaatctatatgccgtaactaagactgacggaattcctataactatcagagttacatcaaaagggttgtattgttattttacacatcttggttatattattagatatcctgttaagagaataatagattccgaagtagtagtctttggtgaggcagttaaggataagaactggaccgtatatctcattaagctaatagagcctgtgaatgcaatcaatgatagactagaagaaagtaagtatgttgaatctaaactagtggatatttgtgatcggatagtattcaagtcaaagaaatacgaaggtccgtttactacaactagtgaagtcgtcgatatgttatctacatatttaccaaagcaaccagaaggtgttattctgttctattcaaagggacctaaatctaacattgattttaaaattaaaaaggaaaatactatagaccaaactgcaaatgtagtatttaggtacatgtccagtgaaccaattatctttggagaatcgtctatctttgtagagtataagaaatttagcaacgataaaggctttcctaaagaatatggttctggtaagattgtgttatataacggcgttaattatctaaataatatctattgtttggaatatattaatacacataatgaagtgggtattaagtccgtggttgtacctattaagtttatagcagaattcttagttaatggagaaatacttaaacctagaattgataaaaccatgaaatatattaactcagaagattattatggaaatcaacataatatcatagtcgaacatttaagagatcaaagcatcaaaataggagatatctttaacgaggataaactatcggatgtgggacatcaatacgccaataatgataaatttagattaaatccagaagttagttattttacgaataaacgaactagaggaccgttgggaattttatcaaactacgtcaagactcttcttatttctatgtattgttccaaaacatttttagacgattccaacaaacgaaaggtattggcgattgattttggaaacggtgcggacctggaaaaatacttttatggagagattgcgttattggtagcgacggatccggatgctgatgctatagctagaggaaatgaaagatacaacaaattaaactctggaattaaaaccaagtactacaaatttgactacattcaggaaactattcgatccgatacatttgtctctagtgtcagagaagtattctattttggaaagtttaatatcatcgactggcagtttgctatccattattcttttcatccgagacattatgctaccgtcatgaataacttatccgaactaactgcttctggaggcaaggtattaatcactaccatggacggagacaaattatcaaaattaacagataaaaagacttttataattcataagaatttacctagtagcgaaaactatatgtctgtagaaaaaatagctgatgatagaatagtggtatataatccatcaacaatgtctactccaatgactgaatacattatcaaaaagaacgatatagtcagagtgtttaacgaatacggatttgttcttgtagataacgttgatttcgctacaattatagaacgaagtaaaaagtttattaatggcgcatctacaatggaagatagaccgtctacaaaaaactttttcgaactaaatagaggagccattaaatgtgaaggtttagatgtcgaagacttacttagttactatgttgtttatgtcttttctaagcggtaaataataatatggtatgggttctgatatccccgttctaaatgcattaaataattccaatagagcgatttttgttcctataggaccttccaactgtggatactctgtattgttaatagatatattaatacttttgtcgggtaacagaggttctacgtcttctaaaaataaaagtttgataacatctggcctgttcataaataaaaacttggcgattctatatatactcttattatcaaatctagccattgtcttatagatgtgagctactgtaggtgtaccatttgattttctttctaatactatatatttctctcgaagaagttcttgcacatcatctgggaataaaatactactgttgagtaaatcagttattttttttatatcgatattgatggacatttttatagttaaggataataagtatcccaaagtcgataacgacgataacgaagtatttatacttttaggaaatcacaatgactttatcagatcaaaattaacaaaattaaaggagcatgtatttttttctgaatatattgtgactccagatacatatggatctttatgcgtcgaattaaatgggtctagttttcagcacggtggtagatatatagaggtggaggaatttatagatgctggaagacaagttagatggtgttctacatccaatcatatatctgaagatatgcacactgataaatttgtcatttatgatatttatacgtttgattcgttcaagaataaacgattggtatttgtacaggtgcctccatcattaggagatgatagctatttgactaatccgttattgtctccgtattatcgtaattcagtagccagacaaatggtcaatgatatgatttttaatcaagattcatttttaaaatatttattagaacatctgattagaagccactatagagtttctaaacatataacaatagttagatacaaggataccgaagaattaaatctaacgagaatatgttataatagagataagtttaaggcgtttgtattcgcttggtttaacggcgtttcggaaaatgaaaaggtactagatacgtataaaaaggtatctaatttgatataatgaattcagtgactgtatcacacgcgccatatactattacttatcacgatgattgggaaccagtaatgagtcaattggtagagttttataacgaagtagccagttggctgctacgagacgagacgtcgcctattcctgataagttctttatacagttgaaacaaccgcttagaaataaacgagtatgtgtgtgtggtatagatccgtatccgaaagatggaactggtgtaccgttcgaatcaccaaattttacaaaaaaatcaattaaggagatagcttcatctatatctagattaaccggagtaattgattataaaggttataaccttaatataatagacggggttataccctggaattattacttaagttgtaaattaggagaaacaaaaagtcacgcgatctactgggataagatttccaagttactgctgcagcatataactaaacacgttagtgttctttattgtttgggtaaaacagatttctcgaatatacgggcaaagttagaatccccggtaactaccatagtcggatatcatccagcggctagagaccgccaattcgagaaagatagatcatttgaaattatcaacgttttactggaattagacaacaaggcacctataaattgggctcaagggtttatttattaatgctttagtgaaattttaacttgtgttctaaatggatgcaactattagaggtaatgatgttatctttgttcttaagactataggtgtcccgtcagcgtgcagacaaaatgaagatccaagatttgtagaagcatttaaatgcgacgagttagaaagatatattgagaataatccagaatgtacactattcgaaagtcttagggatgaggaagcatactctatagtcagaattttcatggatgtagatttagacgcgtgtctagacgaaatagattatttaacggctattcaagattttattatcgaggtgtcaaactgtgtagctagattcgcgtttacagaatgcggtgccattcatgaaaatgtaataaaatccatgagatctaatttttcattgactaagtctacaaatagagataaaacaagttttcatattatctttttagacacgtataccactatggatacattgatagctatgaaacgaacactattagaattaagtagatcatctgaaaatccactaaccagatcgatagacactgccgtatataggagaaaaacaactcttcgggttgtaggtactaggaaaaatccaaattgcgacactattcatgtaatgcaaccaccgcatgataatatagaagattacctattcacttacgtggatatgaacaacaatagttattacttttctctacaacgacgattggaggatttagttcctgataagttatgggaaccagggtttatttcattcgaagacgctataaaaagagtttcaaaaatattcattaattctataataaactttaatgatctcgatgaaaataattttacaacggtaccactggtcatagattacgtaacaccttgtgcattatgtaaaaaacgatcgcataaacatccgcatcaactatcgttggaaaatggtgctattagaatttacaaaactggtaatccacatagttgtaaagttaaaattgttccgttggatggtaataaactgtttaatattgcacaaagaattttagacactaactctgttttattaaccgaacgaggagaccatatagtttggattaataattcatggaaatttaacagcgaagaacccttgataacaaaactaattctgtcaataagacatcaactacctaaggaatattcaagcgaattactctgtccgaggaaacgaaagactgtagaagctaacatacgagacatgttaatagattcagtggagaccgatacctatccggataaacttccgtttaaaaatggtgtattggacctggtagacggaatgttttactctggagatgatgctaaaaaatatacgtgtactgtatcaaccggatttaaatttgacgatacaaagttcgtcgaagacagtccagaaatggaagagttaatgaatatcattaacgatatccaaccattaacggatgaaaataagaaaaatagagagttgtacgaaaaaactttatctagttgtttatgcggtgctaccaaaggatgtttaacattcttttttggagaaactgcaactggaaagtcgacaaccaaacgtttgttaaagtctgctatcggtgacctgtttgttgagacgggtcaaacaattttaacagatgtattggataaaggacctaatccatttatcgctaacatgcatttgaaaagatctgtattctgtagcgaactacctgattttgcctgtagtggatcaaagaaaattagatctgacaatattaaaaagttgacagaaccttgtgtcattggaagaccgtgtttctccaataaaattaataatagaaaccatgcgacaatcattatcgatactaattacaaacctgtctttgataggatagataacgcattaatgagaagaattgccgtcgtgcgattcagaacacacttttctcaaccttctggtagagaggctgctgaaaataatgacgcgtacgataaagtcaaactattagacgaggggttagatggtaaaatacaaaataatagatatagattcgcatttctatacttgttggtgaaatggtacaaaaaatatcatgttcctattatgaaactatatcctacaccggaagagattccggactttgcattctatctcaaaataggtactctgttagtatctagctctgtaaagcatattccattaatgacggacctctccaaaaagggatatatattgtacgataatgtggttactcttccgttgactactttccaacagaaaatatccaagtattttaattctagactatttggacacgatatagagagcttcatcaatagacataagaaatttgccaatgttagtgatgaatatctgcaatatatattcatagaggatatttcatctccgtaaatatatgctcatatatttatagaagatatcacatatctaaatgaataccggaatcatagatttatttgataatcatgttgatagtataccaactatattacctcatcagttagctactctagattatctagttagaactatcatagatgagaacagaagcgtgttattgttccatattatgggatcaggtaaaacaataatcgctttgttgttcgccttggtagcttccagatttaaaaaggtttacattctagtgcctaatattaacattttgaaaatttttaattataatatgggtgtagctatgaacttgtttaatgacgaattcatagctgagaatatctttattcattccacaacaagtttttattctcttaattataacgataacgtcattaattataacggattatctcgctacaataactctatttttatcgttgatgaggcacataatatctttgggaataatactggagaacttatgaccgtgataaaaaataaaaacaagattccttttttactattgtctggatctcccattactaacacacctaatactctgggtcatattatagatttaatgtccgaagagacgatagattttggtgaaattattagtcgtggtaagaaagtaattcagacacttcttaacgaacgaggtgtgaatgtacttaaggatttgcttaaaggaagaatatcatattacgaaatgcctgataaagatctaccaacgataagatatcacggacgtaagtttctagatactagagtagtatattgtcacatgtctaaacttcaagagagagattatatgattactagacgacagctatgttatcatgaaatgtttgataaaaatatgtataacgtgtcaatggcagtattgggacaacttaatctgatgaataatttagatactttatttcaggaacaggataaggaattgtacccaaatctgaaaataaataatggcgtgttatacggagaagaattggtaacgttaaacattagttccaaatttaaatactttattaatcggatacagacactcaacggaaaacattttatatacttttctaattctacatatggcggattggtaattaaatatatcatgctcagtaatggatattctgaatataatggttctcagggaactaatccacatatgataaacggcaaaccaaaaacatttgctatcgttactagtaaaatgaaatcgtctttagaggatctattagatgtgtataattctcctgaaaacgatgatggcagtcaattgatgtttttgttttcgtcaaacattatgtccgaatcctatactctgaaagaggtaaggcatatttggtttatgactatcccagatactttttctcaatacaaccaaattcttggacgatctattagaaaattctcttacgccgatatttctgaaccagttaatgtatatcttttagccgccgtatattccgatttcaatgacgaagtgacgtcattaaacgattacacacaggatgaattaattaatgttttaccatttgacatcaaaaagctgttgtatctaaaatttaagactaaagaaacgaatagaatatactctattcttcaagagatgtctgaaacgtattctcttccaccacatccatcaattgtaaaagttttattgggagaattggtcagacaatttttttataataattctcgtattaagtataacgataccaagttacttaaaatggttacatcagttataaaaaataaagaagacgctaggaattacatagatgatattgtaaacggtcacttctttgtatcgaataaagtatttgataaatctcttttatacaaatacgaaaacgatattattacagtaccgtttagactttcctacgaaccatttgtttggggagttaactttcgtaaagaatataacgtggtatcttctccataaaactgatgagatatataaagaaataaatgtcgagctttgttaccaatggataccttccagttacattggagccacacgagctgacgttagacataaaaactaatattaggaatgccgtatataagacgtatctccatagagaaattagtggtaaaatggccaagaaaatagaaattcgtgaagacgtggaattacctctcggcgaaatagttaataattctgtagttataaacgttccgtgtgtaataacctacgcgtattatcacgttggggatatagtcagaggaacattaaacatcgaagatgaatcaaatgtaactattcaatgtggagatttaatctgtaaactaagtagagattcgggtactgtatcatttagcgattcaaagtactgcttttttcgaaatggtaatgcgtatgacaatggcagcgaagtcactgccgttctaatggaggctcaacaaggtatcgaatctagttttgtttttctcgcgaatatcgttgactcataaaaaagagaatagcggtaagtataaacacgaatactatggcaataattgcgaatgttttattcccttcgatatatttttgataatatgaaaaacatgtctctctcaaatcggacaaccatctcataaaatagttctcgcgcgctggagaggtagttgctgctcgtataatctccccagaataatatacttgcgtgtcgtcgttcaatttatacggatttctatagttctctgttatataatgcggttttccatcatgattagacgacgacaatagtgttctaaatttagatagttgatcagaatgaatgtttattggcgttggaaaaattatccatacagcgtctgcagagtggttgatagttgttcctagatatgtaaaataatccaacttactaggcagcaaattgtctagataaaatactgaatcaaacggtgcagacgtattggtggatctaatggaatccaattgattaactatcttttgaaaatatacatttttatgatccgatacttgtaagaatatagaaataatgataagtccatcatcgtgtttttttgcctcttcataagaactatattttttcttattccaatgaacaagattaatctctccagagtatttgtacacatctatcaagtgattggatccataatcgtcttcctttccccaatatatacgtagtgatgataacacatattcattggggagaaaccctccacttatatatcctcctttaaaattaatccttactagttttccagtgttctggatagtggttggtttcgactcattataatgtatgtctaacggcttcaatcgcgcgttagaaattgcttttttagtttctatattaataggagatagttgttgcggcatagtaaaaatgaaatgataactgtttaaaaatagctcttagtatgggaattacaatggatgaggaagtgatatttgaaactcctagagaattaatatctattaaacgaataaaagatattccaagatcaaaagacacgcatgtgtttgctgcgtgtataacaagtgacggatatccgttaataggagctagaagaacttcattcgcattccaagcgatattatctcaacaaaattcagattctatctttagagtatccactaaactattacggtttatgtactacaatgaactaagagaaatctttagacggttgagaaaaggttctatcaacgatatcgatcctcactttgaagagttaatattattgggtggtaaactagataaaaaggaatctattaaagattgtttaagaagagaattaaaagaggaaagtgatgaacgtataacagtaaaagaatttggaaatgtaattctaaaacttacaacacgggataaattatttaataaagtatatataagttattgcatggcgtgttttattaatcaatcgttggaggatttatcgcatactagtatttacaatgtagaaattagaaagattaaatcattaaatgattgtattaacgacgataaatacgaatatctgtcttatatttataatatgctagttaatagtaaatgaacttttacagatctagtataattagtcagattattaagtataatagacgactagctaagtctattatttgcgaggatgactctcaaattattacactcacggcattcgttaaccaatgcctatggtgtcataaacgagtatccgtgtccgctattttattaactactgataacaaaatattagtatgtaacagacgagatagttttctctattctgaaataattagaactagaaacatgtctagaaagaaacgattatttctgaattattccaattatttgtccaaacaggaaagaagtatactatcgtcatttttttctctagatccagctactactgataatgatagaatagatgctatttatccgggtggcatacccaaaaggggtgagaatgttccagagtgtttatccagggaaattaaagaagaagttaatatagacaattcttttgtattcatagacactcggttttttattcatggcatcatagaagataccattattaataaattttttgaggtaatcttctttgtcggaagaatatctttaacgagtgatcaaatcattgatacatttaaaagtaatcatgaaatcaaggatctaatatttttagatccgaattcaggtaatggactccaatacgaaattgcaaaatatgctctagatactgcaaaactcaaatgttatggccatagaggatgttattacgaatcattaaaaaaattaactgaggatgattgattagaaaatataaattaatttaccatcgtgtatttttataacgggattgtccggcatatcatgtagatagttaccgtctacatcgtatactcgaccatctacgcctttaaatcctctatttattgacattaatctattagaattggaataccaaatattagtaccctcaattagtttattggtaatattttttttagacgatagatcgatggctcttgaaaccaaggttttccaaccggactcattgtcgatcggtgagaagtctttttcattagcatgaatccattctaatgatgtatgtttaaacactctaaacaattggacaaattcttttgatttgctttgaatgatttcaaataggtcttcgtctacagtaggcataccattagataatctagccattataaagtgcacgtttacatatctacgttctggaggagtaagaacgtgactattgagacgaatggctcttcctactatctgacgaagagacgcctcgttccatgtcatatctaaaatgaagatatcattaattgagaaaaaactaataccctcgcctccactagaagagaatacgcatgttttaatgcattctccgttagtgtttgattcttggttaaactcagccaccgccttgattctagtatcttttgttctagatgagaactctatattagagataccaaagactttgaaatatagtaataagatttctattcctgactgattaacaaatggttcaaagactagacatttaccatgggatgctaatattcccaaacatacatctataaatttgacgcttttctcttttaattcagtaaatagagagatatcagccgcactagcatcccctttcaatagttctccctttttaaaggtatctaatgcggatttagaaaactctctatctcttaatgaatttttaaaatcattatatagtgttgctatctcttgcgcgtattcgcccggatcacgattttgtctttcaggaaagctatcgaacgtaaacgtagtagccatacgtctcagaattctaaatgatgatatacctgtttttatttcagcgagtttagccttttgataaatttcttcttgctttttcgacatattaacgtatcgcattaatactgttttcttagcgaatgatgcagacccttctacgtcatcaaaaatagaaaactcgttattaactatgtacgaacataggcctcctagtttggagactaattctttctcatcaactagacgtttattctcaaatagcgattggtgttgtaaggatcctggtcgtagtaagttaaccaacatggtgaattcttgcacactattaacgataggtgtagccgataaacaaatcatcttatggttttttaatgcgatggtcttagataaaaaattatatactgaacgagtaggacggatcttaccatcttctttgattaatgatttagaaatgaagttatgacattcatcaataatgacgcatattctactcttggaattaatagttttgatattagtaaaaaatttatttctaaaattttgatcatcgtaattaataaaaatacaatccttcgttatctctggagcgtatctgagtatagtgttcatccaaggatcttctatcaaagcctttttcaccaataagataatagcccaattcgtataaatatccttaagatgtttgagaatatatacagtagtcattgttttaccaacacccgtttcatggaacaataaaagagaatgcatactgtctaatcctaagaaaactcttgctacaaaatgttgataatccttgaggcgtactacgtctgttcccatcatttcaacaggcatattagtagttctgcgcaatgcataatcgatataggccgcgtgtgatttactcatttatgagtgataagtaataactatgttttaaaaatcacagcagtagtttaactagtcttctctgatgtttgttttcgatactttttgaatcagaagtcatactagaataaagcaacgagtgaacgtaatagagagcttcgtatactctattcgaaaactctaagaacttattaatgaattccgtatccactggattgtttaaaatactaaattgaacactgttcacatccttccaagaagaagacttagtgacggacttaacatgagacataaataaatccaaattttttttacaaacatcactagccaccataatggcgctatctttcaaccagctatcgcttacgcattttagcagtctaacatttttaaagagactacaatatattctcatagtatcgattacacctctaccgaataaagttggaagtttaataatacaatatttttcgtttacaaaatcaaataatggtcgaaacacgtcgaaggttaacatcttataatcgctaatgtatagattgttttcagtgagatgattattagatttaatagcatctcgttcacgtttgaacagtttattgtgtgcgctgaggtcggcaactacggcgtccgctttagtactcctcccataatactttacgctattaatctttaaaatttcatagactttatctagatcgctttctggtaacatgatatcatgtgtaaaaagttttaacatgtcggtcggcattctatttagatcattaactctagaaatctgaagaaagtaattagctccgtattccagactaggtaatgggcttttacctaaagacaagttaagttctggcaatgtttcataaaatggaagaaggacatgcgttccctcccggatattttttacaatttcatccatttacaactctatagtttgttttcattattattagttattatctcccataatcttggtaatacttaccccttgatcgtaagataccttatacaggtcattacatacaactaccaattgtttttgtacataatagattggatggttgacatccatggtggaataaactactcgaacagatagtttatctttccccctagatacattggccgtaatagttgtcggcctaaagaatatctttggtgtaaagttaaaagttagggttcttgttccattattgctttttgtcagtagttcattataaattctcgagatgggtccgttctctgaatatagaacatcatttccaaatctaacttctagtctagaaataatatcggtcttattcttaaaatctattcccttgatgaagggatcgttaatgaacaaatccttggcctttgattcggctgatctattatctccgttatagacgttacgttgactagtccaaagacttacaggaatagatgtatcgatgatgttgatactatgtgatatgtgagcaaagattgttctcttagtggcatcactatatgttccagtaatggcggaaaactttttagaaatgttatatataaaagaattttttcgtgttccaaacattagcagattagtatgaagataaacactcatattatcaggaacattatcaatttttacatacacatcagcatcttgaatagaaacgataccatcttctggaacctcaacaatctcggcagactccggataaccagtcggtgggccatcactaacaataactagatcatccaacaatctactcacatatgcatctatataatctttttcatcttgtgagtaccctggatacgaaataaatttattatccgtatttccataataaggtttagtataaacagagagcgatgttgccgcatgaacttcagttacagtcgccgttggttggtttatttgacctattactctcctaggtttctctataaacgatggtttaatttgtacattcttaaccatatatccaataaagctcaattcaggaacataaacaaattctttgttgaacgtttcaaagtcgaacgaagagtcacgaataacgatatcggatactggattgaaggttaccgttacggtaatttttgaatcggatagtttaagactgctgaatgtatcttccacatcaaacggagttttaatataaacgtatactgtagatggttctttaatagtgtcattaggagttaggccaatagaaatatcattaagttcactagaatatccagagtgtttcaaagcaattgtattattgatacaattattatataattcttcgccctcaatttcccaaataacaccgttacacgaagagatagatacgtgattaatacatttatatccaacatatggtacgtaaccgaatcttcccatacctttaacttctggaagttccaaactcagaaccaaatgattaagcgcagtaatatactgatccctaatttcgaagctagcgatagcctgattgtctggaccatcgtttgtcataactccggatagagaaatatattgcggcatatacaaagttggaatttgactatcgactgcgaagacattagaccgtttaatagagtcatccccaccgatcaaagaattaatgatagtattattcattttctatttaaaatggaaaaagcttacaataaactccgtagagaaatatctataatttgtgagttttccttaaagtaacagcttccgtaaacgccgtctttatctcttagtaggtttattgtatttatgaccttttccttatcttcatagaatactaaaggcaacaaagaaatttttggttcttctctaagagctacgtgagacttaaccatagaagccaacgaatccctacatattttagaacagaaatacccaacttcaccacccttgaatgtctcaatactaataggtctaaaaaccaaatcttgattacaaaaccaacacttatcaattacactatttgtcttaatagacacatctgccatagatttataatactttggtagtatacaagcgagtgcttcttctttagcgggcttaaagactgctttaggtgctgaaataaccacatctggaaggcttactcgcttagccatttaattacggaactatttttttatacttctaatgagcaagtagaaaacctctcatctacaaaaacatactcgtgtccataatcctctaccatagttacacgttttttagatctcatatgtgctaaaaagttttcccatactaattggttactattatttttcgtataatttttaacagtttgaggttttagatttttagttacagaagtgatatcgaatattttatccaaaaagaatgaataattaattgtcttagaaggagtgttttcttggcaaaagaataccaagtgcttaaatatttctactacttcattaatcttttctgtactcagattcagtttctcatcttttacttgattgattatttcaaagactaacttataatcctttttatttattctctcgttagccttaagaaaactagatacaaaatttgcatctacatcatccgtggatatttgatttttttccatgatatccaagagttccgagataatttctccagaacattgatgagacaataatctccgcaatacatttctcaaatgaataagtttattagacacatggaagtttgactttttttgtacctttgtacatttttgaaatacagactcgcaaaaaatacaatattcatatccttgttcagatactataccgttgtgtctacaaccgctacataatcgtagattcatgttaacactctacgtatctcgtcgtccaatattttatataaaaacattttatttctagacgttgccagaaaatcctgtaatatttttagttttttgggctgtgaataaagtatcgccctaatatggttaccgtcctccgccaatatagtagttaaattatccgcacatgcagaagaacaccgcttaggcggattcagtacaatgttatatttttcgtaccaactcatttaaatatcataatctaaaatagttctgtaatatgtctagcgctaatatattgatcataatcctgtgcataaattaagatacaacaatgtctcgaaatcatcgacatggcttcttccatagttagaagatcgtcgtcaaagttagcaacgtgattcatcaacatttgctgttttgaggcagcaaatactgaaccgtcgccattcaaccattcataaaaaccatcgtctgaatccattgataatttcttgtactggtttttgagagctcgcatcaatctagcatttctagctcccggattgaaaacagaaagaggatcgtacatccagggtccattttctgtaaatagaatcgtataatgtcccttcaagaagatatcagacgatccacaatcaaagaattggtctccgagtttgtaacaaactgcggactttaacctatacatgataccgtttagcatgatttctggtgatacgtcaatcggagtatcatctattagagatctaaagccggtgtaacattctccaccaaacatattcttattctgacgtcgttctacataaaacatcattgctccattaacgataacaggggaatgaacagcactacccatcacattagttcccaatggatcaatgtgtgtaactccagaacatcttccatatcctatgttaggaggagcgaacaccactcttccactattgccatcgaatgccatagaataaatatccttggaattgatagaaatcggactgtcggatgttgtgatcatcttcataggattaacaactatgtatggtgccgcctgaagtttcatatcgtaactgatgccgtttataggtctagccacagaaaccaacgtaggtctaaatccaactatagacaaaatagaagccaatatctgttcttcatctgtcataacttgagagcatccagtatgaataatcttcattagatggggatctaccgcatcatcatcgttacaataaaaaattcccattctaatgttcataattgcttttctaatcatggtatgcatgtttgctctctgaatctctgtggaaattagatctgatacacctgtaatcactatcggattatcctccgtaagacgattaaccaacaacatataattataagactttacttttctaaattcataaagttgctggattaggctataggtgtctccatgtacatacgcgttctcgagcgcaggaagtttaataccgaatagtgccatcagaataggatgaatatagtaattagtttctggttttctataaataaaagacaaatcttgtgaactagacatatcggtaaaatgcatggattggaatcgtgtagtcgacagaagaatatgatgattagatggagagtatattttatctaactctttgagttggtcaccgattctaggactagctcgagaatgaataagtactaaaggatgagtacatttcacagaaacactagcattgttcaatgtgctctttacatgggtaaggagttgaaatagctcgtttctatttgttctgacaatatttagtttattcataatgttaagcatatcctgaatagtaaagttagatgtgtcatacttgttagtagttagatatttagcaattgcattcccatcatttctcaatctcgtactccaatcatgcgtggatgctacttcgtcgatggaaaccatacaatcctttttgataggctgttgagattgattatttcctgcacgtttaggtttggtacgttgatttctagcccctgcggatataaagtcatcgtctacaattttggataatgaattgcatacactacaagacaaagatttatcagaagtgtgaatatgatcttcatctaccaaagaaagagtttgattagtataactagattttagtcctgcgttagatgttaaaaaaacatcgctattgaccacggcttccattatttatattcgtagtttttactcgaaagcgtgattttaatattcaatcttattacttttggaatcgttcaaaacctttgactaattgtagaatttgatctattgccctacgcgtatactcccttgcatcatatacgttcgtcaccagatcgtttgtttcggcctgaagttggtgcatatctctttcaacattcgacatgagatccttaagggccatatcgtctagattttgttgagatgctgctcctggatttggattttgttgtgctgttgtacatactgtaccaccagtaggtgtaggagtacatacagtggccacaataggaggttgaggaggtgtaaccgttggagtagtacaagaaatacttccatccgattgttgtgtacatgtagttgttggtaacgtctgagaaggttgggtagatggcggcgtcgtcgtcttttgatctttattaaatttagagataatatcctgaacagcattgctcggcgtcaacgctggaaggagtgaactcgccggcgcatcagtatctgcagacagccaatcaaaaagattagacatatcagatgatgtattagtttgttgtcgtggttttggtgtaggagccggtgtagctgttggaaccggctgtggagttatatgaatagttggttgtagcggttggataggctgtctgctggcggccatcatattatctctagctagttgttctcgcaactgtctttgataatacgactcttgagactttagtcctatttcaatcgcttcatcctttttcgtatccggatccttttcttcagaataatagattgacgactttggtgtagaggattctgccagcccctgtgagaacttgttaaagaagtccatttaaggctttaaaattgaattgcgattataagattaaatggcagacacagacgatattatcgactatgaatccgatgatctcaccgaatacgaggatgatgaagaagaggaagaagatggagagtcactagaaactagtgatatagatcccaaatcttcttataagattgtagaatcagcatccactcatatagaagatgcgcattccaatcttaaacatatagggaatcatatatctgctcttaaacgacgctatactagacgtataagtctatttgaaatagcgggtataatagcagaaagctataacttgcttcaacgaggaagattacctctagtttcagaattttctgacgaaacgatgaagcaaaatatgctacatgtaattatacaagagatagaggagggttcttgtcctatagtcatcgaaaagaacggagaattgttgtcggtaaacgattttgacaaagatggtctaaaattccatctagactatattatcaaaatttggaaacttcaaaaacgatattagaatttatacgaatatcgttctctaaatgtcacaatcaagtctcgcatgttcagcaatttattgtcgtactttatatcgtgttcattaacgatatcttgcaaaatagtaatgattctatcttccttcgatagatattcttcagagattattgtcttatattctttcttgttatcagatatgaatttgataagactttgaacattattgatacccgtctgtttaattttttctacagatattttagttttggcagattctatcgtatctgtcaatagacatccaacatcgacattcgacgtcaattgtctataaatcaacgtataaattttagaaataacattagcgaattgttgtgcattgatgtcgttattctgaaacagtatgattttaggtagcattttcttaacaaagagaacgtatttattgttactcagttgaacagatgatatatccagattactaacgcatctgattccatataccaaactttcagaagaaatggtgtacaattgtttgtattcattcaatgtctctttttcagaaattagtttagagtcgaatactgcaataattttcaagagatagttttcatcagataagattttatttagtgtagatatgataaaactattgttttgttggagaacttgatacgccgcgttctctgtagtcgacgctctcaaatgggaaacaatctccattatttttttggaatcggatacaatatcttcggtatcttgacgcaatctagtatacatagagttaagagaaattagagtttgtacattaagcaacatgtctctaaatgtggctgcaaacttttccttttccacatcatctagtttattatataccgatttcacaacggcaccagatttaaggaaccagaatgaaaaactctgataactacaatatttcatcatagttacgattttatcatcttctatagttggtgtaatagcgcatacctttttctccaagactggaaccaacgtcataaaaatgtttaaatcaaaatccatatcaacatctgatgcgctaagaccagtctcgcgttcaagattatctttactaatggtgacgaactcatcgtatagaactctaagtttgtccattatttatttacagatttagttgtttaatttatttgtgctcttccagagttgggatagtatttttctaacgtcggtattatattattaggatctacgttcatatgtatcataatattaatcatccacgttttgataaatctatctttagcttctgaaataacgtatttaaacaaaggagaaaaatatttagctacggcatcagacgcaataacattttttgtaaatgtaacgtatttagacgacagatcttcgttaaaaagttttccatctatgtagaatccatcggttgttaacaccattcccgcgtcagattgaataggagtttgaatagtttgttttggaaatagatccttcaataacttatagttgggtgggaaaaaatcgattttatcactagactctttcttttttactatcattacctcatgaactatttcttgaatgagtatatgtattttctttcctatatcggacgcgttcattggaaaatataccatgtcgttaactataagaatatttttatcctcgtttacaaactgaataatatcagatgtagttcgtaaacgaactatatcatcaccagcacaacatctaactatatgatatccactagtttcctttagtcgtttattatcttgttccatattagcagtcattccatcatttaagaaggcgtcaaagataatagggagaaatgacattttggattctgttacaactttaccaaaattaaggatatacggacttactatctttttctcaacgtcgatttgatgaacacacgatgaaaatgtacttcgatgagattgatcatgtagaaaacaacaagggatacaatatttccacatatcatgaaatatattaagaaatcccaccttattatatttccccaaaggatccatgcatgtaaacattatgccgttatcattaataaagacttctttctcatcggatctgtaaaagttgttactgatttttttcattccaggatctagataattaataatgatgggttttctattcttattctttgtattttggcatatcctagaccagtaaacagtttccactttggtaaaatcagcagacttttgaacgctattaaacatggcattaatggcaataactaaaaatgtaaaatatttttctatgttaggaatatggtttttcactttaatagatatatggtttttggccaaaatgatagatatttttttatccgaggatagtaaaatattattagtcgccgtctctataaaaatgaagctagtctcgatatccaattttattctagaattgataggagtcgccaaatgtaccttatacgttatatctcccttgatgcgttccatttgtgtatctatatcggacacaagatctgtaaatagttttacgttattaatcatcacggtatcgccgtcgctagataacgctaatgtaccatccaagtcccaaatggagagatttaactgttcatcgtttagaataaaatgattaccggtcatattaataaagtgttcatcgtatctagataacaacgacttataattaatgtccaagtcttgaactcgctgaatgatcttttttaacccagttagttttagattggtacgaaatatattgttaaactttgattctacagtaatgtccaaatctagttgtggaaatacttccatcaacattgtttcaaacttgataatattattatctacatcttcatacgatccaaattccggaatagatgtatcgcacgctctggccacccagataaccaaaaagtcacacgctccaggatatacattgtataaaaagctatcgttttttagtagtgtttttttctgagtatatacgaagggattaaaaatagtattatcaacgtaactatattccaaattattcttatgagaatagataataatatcgtccttaatatctaacaaatttcctaaatatccctttaattgagtcattcgaagcgtcaatagaatatgtctcttaactatttccggctgttgtatatttaaatgacttcgtaaaaaataatatatgggcgacttctcatctatgtaatcatatggagtgagatatagggctcgttctacctcctgccccttacccacctgtaataccaattgcggacttactatatatcgcatatttatatcgtggggtaaagtgaaaatctactaccgatgatgtaagtcttacaatgttcgaaccagtaccagatcttaatttggaggcctccgtagaactaggggaggtaaatatagatcaaacaacacctatgataaaggaaaatagcggttttatatcccgtagtagacgtctattcgcccatagatctaaggatgatgagagaaaactagcactacgattctttttacaaagactttattttttagatcatagagagattcattatttgttcagatgcgttgacgctgtaaaagacgtcactattaccaaaaaaaataacattatcgtggcgccttatatagcacttttaactatcgcatcaaaaggatgcaaacttacagaaacaatgattgaagcattctttccagaactatataatgaacatagtaagaaatttaaattcaactctcaagtatccatcatccaagaaaaactcggataccagtttggaaactatcacgtttatgattttgaaccgtattactctacagtagctctggctattcgagatgaacattcatctggcatttttaatatccgtcaagagagttatctggtaagttcattatctgaaataacatatagattttatctaattaatctaaaatctgatcttgttcaatggagtgctagtacgggcgctgtaattaatcaaatggtaaatactgtattgattacagtgtatgaaaagttacaactggtcatagaaaatgattcacaatttacatgttcattggctgtggaatcaaaacttccaataaaattacttaaagatagaaatgaattatttacaaaattcatcaacgagttaaaaaagaccagttcattcaagataagcaaacgcgataaggatacgctactaaaatattttacttaggactggagttagaatttatagacgactcatttcgtttatcattattagtattcttcttgttatcttgttcagaaatatacagcaatgctatgcctaatactaaatacattatcatgcttgcaatggctctaacaacgacgaaccaaaatgaatttggtcgtagcttttgttcacaaaaatacataaagaaatgtctacataaatctatggcgccattggctacttgaaatagcgccagtcctcctacagattttaatatagctgtataacatgacatttattcatcatcaaaagagacagagtcaccatctgtcatatttagattttttttcatgtgttcaaagtatcctctactcatttcattataatagtttatcatacttagaattttaggacggatcaatgagtaagacttgactagatcgtcagtagtaatttgtgcatcgtctattctgcatccgcttcgtcgaataatgtatagcatcgctttgagattctccatagctatcaagtctttatacaatgacatggaaatatctgtgaatactttatacttctccaacatcgatgccttaacatcatcgcctactttagcattgaaaatacgttctattgtgtagatggatgtagcaagatttttaaacaacaatgccattttacacgatgattgcctcaagtctccaatcgtttgtttagaacgattagctacagagtccaatgcttggctgactagcatattattatctttagaaattgtattcttcaatgaggcgtttatcatatctgtgatttcgttagtcatattacagtctgactgggttgtaatgttatccaacatatcacctatggatacggtacacgtaccagcatttgtaataatcctatctaagatgttgtatggcattgcgcagaaaatatcttctcctgtaatatttccactctcgataaatctactcagattattcttaaatgccttattctctggagaaaagatatcagtgtccatcatttcattaatagtatacgcagaaaagataccacgagtatcaattctatccaagatacttatcggttccgagtcacagataatggtttcctctccttcgggagatcctgcatagaaatatctaggacaatagtttctatactgtctgtaactctgataatctctaaagtcactaactgataccatgaaattgagaagatcaaacgctgaagtaattaatttttctgcctcgtttttactacaactagttttcatcaatgtagtgacgatgtattgtttagttactcttggtctaatactgatgatagagatattattacttcccataatggatcttctagtagtcaccttaaagcccattgatgcaaatagcagatagataaagtcttggtatgactcctttctaatatagtacggactacctttgtcacccaactttatacccacataagccataacaacctctttaatagccgtttcatgaggtttatcagccatgagcctgagtagttggaagaatctcatgaatcctgtctcagaaagtcctatatgcatgatagatttatctttcctgggaaactctcgtatagtcatagatgaaatactcttcaaagtttctgaaataagattagtaacagtcttacctccgactactctaggtaacaaacaaactctaataggtgttttctctgcggagataatatcagaaaggatagagcaataagtagtattattgtgattataaagaccgaatacataacaggtagaatttataaacatcatgtcctgaaggtttttagacttgtattcctcgtaatccataccgtcccaaaacatggatttggtaactttgatagccgtagatctttgttccttcgccaacaggttaaagaaattaataaagaatttgtggtttctacctatgtctacaaattgcacgtttggaagcgccacggttacattcactgcagcattttgaggatcgcgagtatgaagtacgatgttattgtttactggtatatctggaaagaattctaccagtctaggaataagagattgatatcgcatagaaatacaaaagttcataatctcatcatctaagagcattttgttaccattgtaataaatatccactctgtcatatgtataaatgaagtactgttcaaacatgatgagatgtttatatgttggcatagtagtgagatctacgtttggtaatggcaatgtattaagattaactccataatgtctagcagcatctgcgatgttataagcgttgtcaaagcggggtcgatcttgtgctgttatatattgtctaacacctataagattatcaaaatcttgtctgcttaatacaccgttaacaatttttgccttgaattcttttattggtgcattaataacatccttatagaggatgttaaacaaataagtgttatcaaagttaagatctggatatttcttttctgctagaacatccattgagtcggagccatctggtttaatataaccaccgataaatctagctctgtattctgtatccgtcaatctaatattaagaaggtgttgagtgaaaggtggaagatcgtaaaagctgtgagtattaatgataggattagtttccgaactaatgttaattggggtattaataatatctatatttccagcgttaagtgtaacattaaacagttttaattcacgtgacgtggtatcaattaaataattaatgcccaatttggatatagcagcctgaagctcatcttgtttagttacggatcctaatgagttattaagcaatatatcgaacggatgaacgaaggttgttttaagttggtcacatactttgtaatctagacatagatgcggaagaacggtagaaactatacgaaataaatattcagagtcctctaattgatcaagagtaactattgacttaataggcatcatttatttagtattaaatgacgaccgtaccagtgacggatatacaaaacgatttaattacagagttttcagaagataattatccatctaacaaaaattatgaaataactcttcgtcaaatgtctattctaactcacgttaacaacgtggtagatagagaacataatgccgccgtagtgtcatctccagaggaaatatcctcacaacttaatgaagatctatttccagatgatgattctccggccactattatcgaacgagtacaacctcatactactattattgacgatactccacctcctacgtttcgtagagagttattgatatcggaacaacgtcaacaacgagaaaaaagatttaatattacagtatcgaaaaatgctgaagcaataatggaatctagatctatgatatcttctatgccaacacaaacaccatccttgggagtagtttatgataaagataaaagaattcagatgttggaggatgaagtggttaatcttagaaatcaacgatctaatacaaaatcatctgataatttagataattttaccagaatactatttggtaagactccgtataaatcaacagaagttaataagcgtatagccatcgttaattatgcaaatttgaacgggtctcccttatcagtcgaggacttggatgtttgttcagaggatgaaatagatagaatctataaaacgattaaacaatatcacgaaagtagaaaacgaaaaattatcgtcactaacgtgattattattgtcataaatattatcgagcaagcattgctaaaactcggatttgaagaaatcaaaggactgagtaccgatatcacttcagaaattatcgatgtggagatcggagatgactgcgatgctgtagcatcaaaactaggaatcggtaacagtccggttcttaatattgtattgtttatactcaagatattcgttaaacgaattaaaattatttaatttaatacattcccatatccagacaacaatcgtctggattaatctgttcctgtcgtctcataccggacgacatattaatctttttattagtaggcatctttttagatggtttctttttcccagcattaactgagtcgatacctagaagatcgtgattgatctctccgaccattccacgaacttctaattggccgtctctgacggtaccataaactattttaccagcattagtaacagcttggacaatctgaccatccatcgcattgtacgatgtagtagtaactgttgttctacgtctaggagcaccagaagtatttttggagcccttggatgttgatgtagaagaagacgaggattttgattttggtttacatgtaatacattttgtatcacatgcgccggcagtcacatctgtttgagaattaagattattgttgcctcctttgacggctgcatctccaccgatttgcgctagtagatttttaagctgtggtgtaatcttattaactgtttcgatataatcatcgtaactgcttctaacggctaaattttttttatccgccatttagaagctaaaaatatttttatttatgcagaagatttaactagattatacaatgaactaatatgatccttttccagattatttacaaacttggtattttttggttctggaggaggcgaatttaaattcggacttggatttggattttgtgggttcttgatcttattatacagcgcatataggatggcgacggtaactgctacgcaaataccgatcaacaaaagaataccaatcatttattgacaataacttcactattgatcaagtatgcaatatatcatcttttcactaaataagtagtaataatgattcaacaatgtcgagatatatggacgataataatttagttcatggaaatatcgctatgattggtatgaatgactccgctaactctgtggggcgcgcagtgctttccccacatagaataaattagcattccgactgtgataataataccaagtataaacgccataatactcaatactttccatgtacgagtgggactggtagacttactaaagtcaataaaggcgaagatacacgaaagaatcaaaagaatgattccagcgattagcacgccggaaaaataatttccaatcataagcatcatatccatttaactaataaaaattttaaatcgccgaatgaacaaagtggaatataaaccatataaaaacaatagtttgtactgcaaaaataatatctatttttgttttcgaagatatggtaaaattaaatagtagtacacagcatgttataactaacagcagcaacggctcgtaattacttatcatttactagacgaaaaggtggtgggatattttcttgctcaaataatacgaatatatcacccatccattttatgcgatgtttatatactctaatctttaatagatctatagacgacgggtttaccaacaatatagattttatcgattcatctaatttaaacccttccttaaacgtgaatgatctattatctggcataacgatgactctacccgatgaatcggacaatgtactgggccatgtagaataaattatcaacgaattatcgtctacgaacatttatatcatttgttttaattttagtacgcgaataaatagatataaaatagaaaataacagatattacaaccaatgttatggccgcgcccaaccaggtaggcagttttattttatcttttactacaggttctcctggatgtacgtcaccaacggcggacgtagttctagtacaattagacgtaagttccgcttgggaattttttaacgctaaagagttaacgttaatcgtgcacccaacgtatttacatctagttctttgaacatcttgattataatataaccattttctatctctagattcgtcggtgcactcatgtaaccaacataccctaggtcctaaatatttatctccggaattagattttggataattcgcgcaccaacaatttctatttcctttatgatcgttacaaaagacgtataatgccgtatccccaaaagtaaaataatcaggacgaataattctaataaactcagaacaatatctcgcatccatatgtttggagcaaatatcggaataagtagacatagccggtttccgttttgcacgtaaccattctaaacaattggggtttccaggatcgtttctacaaaatccagtcatgaaatcatcacaatgttctgtcttgtaattattattaaatatttttggacagtgtttggtatttgtcttagaacaacattttgccacgctatcactatcgcccaggagataatccttttttataaaatgacatcgttgcccggatgctatataatcagtagcgtgttttaaatccttaatatattcaggagttacctcgttctgataatagattaatgatccaggacgaaatttgaaagaactacatggttctccatgaattaatacatattgtttagcaaattcaggaactataaaactactacaatgatctatcgacataccatctatcaaacaaaacttgggtttaatttctcccggagatgtttcataatagtacgtataactttcttctgcaaacttaacagctctattatattcaggataattaaaacctaattccatatatttgtctcgtatatctgctattcctggtgctattttgattctattaagagtaacggctgcccccatttttaataatcgtcagtatttaaactgttaaatgttggtatatcaacatttaccttatttcccgcagtataaggtttgttgcaggtatactgttcaggaatggttacatttatactttttctatagtcctgtctttcgatgttcatcacatatgcaaagaacagaataaacaaaataatgtaagaaataatattaaatatctgtgaattcgtaaatacattgattgccataataattacagcagctacaatacatacaatagacattcccacagtgttgccattacctccacgatacatttgagttactaagcaataggtaataactaagctagtaagaggcaatagaaaagatgagataaatatcatcaatatagagattagaggagggctatatagagccaagacgaacaaaatcaaaccgagtaacgttctaacatcattatttttgaagattcccaaataatcattcattcctccataatcgttttgcatcatacctccatctttaggcataaacgattgctgctgttcctctgtaaataaatctttatcaagcactccagcacccgcagagaagtcgtcaagcatattgtaatatcttaaataactcatttatatattaaaaaatgtcactattaaagatggagtataatctttatgccgaactaaaaaaaatgacttgtggtcaacccctaagtctttttaacgaagacggggatttcgtagaagttgaaccgggatcatcctttaagtttctgatacctaagggattttacgcctctccttccgtaaagacgagtctagtatttgaaacattaacaacgaccgataataaaattactagtatcaatccaacaaatgcgccaaagttatatcctcttcaacgcaaagtcgtatctgaagtagtttctaatatgaggaaaatgatcgaatcaaaacgtcctctatacatcactcttcacttggcgtgtggatttggtaagactattaccacgtgttatcttatggctacacacggtagaaaaaccgtcatttgcgtacccaataaaatgttaatacatcaatggaagacacaggtagaggcagtcggattggaacataagatatccatagatggagtaagtagtctattaaaggaactaaagactcaaagtccggatgtattaatagtagtcagtagacatctgacaaacgatgccttttgtaaatatatcaataagcattatgatttgttcatcttggatgaatcacatacgtataatctgatgaacaatacagcagttacaagatttttagcgtattatcctccgatgatgtgttattttttaactgctacacctagaccatctaacagaatttattgtaacagtattattaatattgccaagttatccgatctaaaaaaaactatctatgcagtagatagtttttttgagccatattccacagataatattagacatatgataaaacgattagatggaccatctaataaatatcatatatataccgagaagttattatctgtagacgagcctagaaatcaacttattcttaataccctggtagaagaattcaagtcaggaactattaatcgcattttagttattactaaactacgtgaacatatggtattcttctacaaacgattattagattttttcggatcagaggttgtatttataggagacgcccaaaatagacgtactccagatatggtcaaatcaatcaaggaactaaatagatttatattcgtatccaccttattttattccggtactggtttagatattcctagtttggattctttgttcatttgctcggcagtaatcaacaatatgcaaatagagcaattactagggagggtatgtcgagaaacagaactattagataggacggtatatgtatttcctagcacatccatcaaagaaataaagtacatgataggaaatttcgttcaacgaattattagtctgtctgtagataaactaggatttaaacaaaaaagttatcggaaacatcaagaatccgatcccacttctgtatgtacaacatcctccagagaagaacgtgtattaaatagaatatttaactcgcaaaatcgttaagaagtttaagcgacgatccgcatgctgcgcaggccagtgtattacccctcatagtattaatataatccaatgatacttttgtgatgtcggaaatcttaaccaatttagactgacaggcagaacacgtcatgcaatcatcatcgtcatcgataactgtagtcttgggcttctttttgcggctcttcattccggaacgcacattggtgctatccatttaggtagtaaaaaataagtcagaatatgccctatagcacgatcgtgcaaaacctggtatatcgtctctatctttatcacaatatagtgtatcgacatctttattattattgacctcgtttatcttggaacatggaatgggaacatttttgttatcaacggccacctttgccttaattccagatgttgtaaaattataactaaacagtctatcatcgacacaaatgaaattcttgtttagacgtttgtagtttacgtatgcggctcgttcgcgtctcattttttcagatattgcaggtactataatattaaaaataagaatgaaataacataggattaaaaataaagttatcatgacttctagcgctgatttaactaacttaaaagaattacttagtctgtacaaaagtttgaaattttcagattctgcggctatagaaaagtataattctttggtagaatggggaacatctacttactggaaaataggcgtgcaaaaggtagctaatgtcgagacgtcaatatctgattattatgatgaggtaaaaaataaaccgtttaatattgatccgggctattacattttcttaccggtatattttgggagcgtctttatttattcgaagggtaaaaatatggtagaacttggatctggaaactcttttcaaataccagatgatatgcgaagtgcgtgtaacaaagtattagacagcgataacggaatagactttctgagatttgttttgttaaacaatagatggataatggaagatgctatatcaaaatatcagtctccagttaatatatttaaactagctagtgagtacggattaaacatacccaaatatttagaaattgaaatagaggaagacacattatttgacgacgagttatactctattatagaacgctctttcgatgataaatttccaaaaatatccatatcgtatattaagttgggagaacttaggcggcaagttgtagactttttcaaattctcattcatgtatattgagtccatcaaggtagatcgtataggagataatatttttattcctagcgttataacaaaatcaggaaaaaagatattagtaaaagatgtagaccatttaatacgatccaaggttagagaacatacatttgtaaaagtaaaaaagaaaaacacattttccattttatacgactatgatggaaacggaacagaaactagaggagaagtaataaaacgaattatagacactataggacgagactattatgttaacggaaagtatttctctaaggttggtagtgcaggcttaaagcaattgactaataaattagatattaatgagtgcgcaactgtcgatgagttagttgatgagattaataaatccggaactgtaaaacgaaaaataaaaaaccaatcagcatttgatttaagcagagaatgtttgggatatccagaagcggattttataacgttagttaataacatgcggttcaaaatagaaaattgtaaggttgtaaatttcaatattgaaaatactaattgtttaaataacccgagtattgagactatatatggaaactttaaccagttcgtctcaatctttaatatcgtcaccgatgtcaaaaaaagattattcgagtgaaataatatgcgcctttgatataggtgcaaaaaatcctgccagaactgttttagaagtcaaggataactccgttagggtattggatatatcaaaattagactggagttctgattgggaaaggcacatagctaaagatttgtcacaatatgaatacactacagttcttctagaacgtcagcctagaaggtcgccgtacgtcaaatttatctattttattaaaggctttttatatcatacatcggctgccaaagttatttgcgtctcgcctgtcatgtctggtaattcatatagagatcgaaaaaagagatcggtcgaagcatttcttgattggatggacacattcggattgcgagactccgttccggatagacgcaaattagacgatgtagcggatagtttcaatttggctatgagatacgtattagataaatggaatactaattatacaccttataataggtgtaaatctagaaattacataaaaaaaatgtaataacgttagtaacgccattatggataatctatttacctttctacatgaaatagaagatagatatgccagaactatttttaactttcatctaataagttgcgatgaaataggagatatatatggtcttatgaaagaacgcatttcctcagaggatatgtttgataatatagtgtataataaagatatacatcatgccattaagaaactagtgtattgcgacatccaacttactaaacacattattaatcagaatacgtatccggtatttaacgattcttcacaagtgaaatgttgtcattatttcgatataaactcagataatagcaatattagctctcgtacagtagagatatttgagagggaaaagtcatctcttgtatcatatattaaaactaccaataagaagagaaaggtcaattatggggaaataaagaaaactgtacatggaggcactaatgcaaattacttttccggtaaaaagtctgatgagtatctgagcactacagtcaggtccaacattaatcaaccttggatcaaaaccatttctaagagaatgagagtagatatcattaatcactctatagtaacgcgtggaaaaagctctatattacaaactatagaaattatttttactaatagaacatgtgtgaaaatattcaaggattctactatgcacattattctatccaaggacaaggatgaaaaggggtgtatacacatgattgacaaattattctatgtctattataatttatttctgttgttcgaggatatcatccaaaacgagtactttaaagaagtagctaatgttgtaaaccacgtactcacggctacggcattagatgagaaattattcctaattaagaaaatggctgaacacgatgtttatggagttagcaatttcaaaatagggatgtttaacctgacatttattaagtcgttggatcataccgttttcccctctctgttagatgaggatagcaaaataaagttttttaaggggaaaaagctcaatattgtagcattacgatctctggaggattgtataaattacgtgactaaatccgagaatatgatagaaatgatgaaggaaagatcgactattttaaatagcatagatatagaaacggaatcggtagatcgtctaaaagaattgcttctaaaatgaaaaaaaaacactaattcagaaatggatcaacgactcggatataagtttttggtgcctgatcctaaagccggagttttttatagaccgttacatttccaatatgtatcgtattctaattttatattgcatcgattgcatgaaatcttgaccgtcaagcggccactcttatcgtttaagaataatacagaacgaattatgatagaaattagcaatgttaaagtgactcctccagattactcacctataatcgcgagtattaaaggtaagagttatgacgcattagccacgttcactgtaaatatctttaaagaggtaatgaccaaagagggtatatccatcactaaaataagtagttatgagggaaaagattctcatttgataaaaattccgctactaataggatacgggaataaaaatccacttgatacagccaagtatcttgttcctaatgtcataggtggagtctttatcaataaacaatctgtcgaaaaagtaggaattaatctagtagaaaagattacaacatggccaaaatttagggttgttaagccaaactcattcactttctcgttttcctccgtatcccctcctaatgtattaccgacaagatatcgccattacaagatatctctggatatatcacaattggaagcgttgaatatatcatcgacaaagacatttataacggtcaatattgttttgctgtctcaatatttatctagagtgagtctagaattcattagacgtagtttatcatacgatatgcctccagaagttgtctatctagtaaacgcgataatagatagtgctaaacgaattactgaatctattactgactttaatattgatacatacattaatgacctggtggaagctgaacacattaaacaaaaatctcagttaacgatcaacgagttcaaatatgaaatgctgcataactttttacctcatatgaactatacacccgatcaactaaagggattttatatgatatctttactaagaaagtttctctactgtatctaccacacttctagatatccagatagagattcgatggtttgtcatcgcatcctaacgtacggcaaatattttgagacgttggcacatgatgaattagagaattacataggcaacatccgaaacgatatcatgaacaatcacaagaacagaggcacttacgcggtaaacattcatgtactaacaactcctggacttaatcatgcattttctagtctattgagtggaaagttcaaaaagtcagacggtagttatcgaacacatcctcactattcatggatgcagaatatttctattcctaggagtgttggattttatccggatcaagtaaagatttcaaagatgttttctgtcagaaaataccatccaagtcaatatctttacttttgttcatcggacgttccggaaagaggtcctcaggtaggtttagtatctcaattgtctgtcttgagttccattacaaatatactaacgtctgagtatttggatttggaaaagaaaatttgtgagtatatcagatcatattataaagatgatataagttactttgaaacaggatttccaatcactatagaaaatgctctagtcgcatctcttaatccaaatatgatatgtgattttgtaactgactttagacgtagaaaacggatgggattcttcggtaacttggaggtaggtattactttagttagggatcacatgaatgaaattcgcattaatattggagcgggaagattagtcagaccattcttggttgtggataacggagagctcatgatggatgtgtgtccggagttagaaagcagattagacgacatgacattctctgacattcagaaagagtttccgcatgtcatcgaaatggtagatatagaacaatttacttttagtaacgtatgtgaatcggttcaaaaatttagaatgatgtcaaaggatgaaagaaagcaatacgatttatgtgactttcctgccgaatttagagatggatatgtagcatcttcactagtgggaatcaatcacaattctggacccagagctattcttggatgtgctcaagctaaacaagctatctcttgtctgagctcggatatacgaaataaaatagacaatggaattcatttgatgtatccagagaggccaatcgtgattagtaaggctttagaaacttcaaagattgcggctaattgcttcggccaacatgttactatagcattaatgtcgtacaaaggtatcaatcaagaggatggaattatcatcaaaaaacaatttattcagagaggcggtctcgatattgttacagccaagaaacatcaagtagaaattccgttggaaaactttaataacaaagaaagagataggtctaacgcctattcaaaattagaaagtaatggattagttagactgaatgctttcttggaatccggagacgctatagcacgaaatatctcatcaagaactcttgaagatgattttgctagagataatcagattagctttgatgtttccgaaaaatataccgatatgtacaaatctcgcgttgaacgagtacaagtagaacttactgacaaagttaaggtacgagtattaaccatgaaagaaagaagacccattctaggagacaaatttaccactagaacgagtcaaaagggaacagtcgcgtatatcgcggatgaaacggaacttccatacgatgaaaatggtatcacaccagatgtcattattaattctacatccatcttctctagaaaaactatatctatgttgatagaggttattttaacagccgcatattctgctaagccgtacaacaataagggagaaaaccgacctgtctgttttcctagtagtaacgaaacatccatcgatacatatatgcaattcgctaaacaatgttatgagcattcaaatccgaaattgtctgatgaagaattatcggataaaatcttttgtgaaaagattctctatgatcctgaaacggataagccttatgcatccaaagtattttttggaccaatttattacttgcgtctgaggcatttaactcaggacaaggcaaccgttagatgtagaggtaaaaagacgaagctcattagacaggcgaatgagggacgaaaacgtggaggaggtatcaagttcggagaaatggagagagactgtttaatagcgcatggtgcagccaatactattacagaagttttgaaagattcggaagaagattatcaagatgtgtatgtttgtgaaaattgtggagacatagcagcacaaatcaagggtattaatacatgtcttagatgttcaaaacttaatctctctcctctcttaacaaaaattgataccacgcacgtatctaaagtatttcttactcaaatgaacgccagaggcgtaaaagttaaattagatttcgaacgaaggcctccttcgttttataaaccattagataaagttgatctcaaaccgtcttttctggtgtaatattctagtttggtagtagatacatatcaatatcatcaaattcgagatccgaattataaaatgggcgtggattgttaactatagaatcggacgtctgatattcgaaaatctgtggagttttaggttttggtggaggtgtaactgctacttgggatactgaagtctgatattcagaaagctgggggatgttctggttcgacatccaccgatggtgtcacatcactaatcggttcggtaacgtctgtggacgatggaggcaccacttctacaggttctggttctttatcctcagtcatcaacggagctacttcaatgcgaggaaatgtataatttggtaatggtttctcatgtggatctgaagaagaggtaagatatctactagaaagataccgatcacgttctagttctcttttgtagaacttaactttttctttctccgcatctagttgatattccaacctcttcacgttcgcatgggttacctccgcagtttttacgagcgatttcacgttcagccttcatgcgtcttatagcatgaattcgcttatcgttatcgggtttagcttctgtcaccttagcaattccttttttattaaactctacataatcatatccatttctattgtttgttctaatataaacgagtatagcatcattgctaaatttttcaatagtatcgaaaacagaatatcctaaaccatataatatatattcaggaacactcaaactaaatgtccaggattctcctaaatacgtaaactttaatagtgcgaaatcattcaaaaatctaccacttatagatagatagatagtacataaatgcgtatagtagtctacctatctctttattatgaaaaccggcattacgatcatatatgtcgtgatatacctgtgatccgtttacgttaaaccataaatacatgggtgatcctataaacatgaatttatttctaattctcagagctatagttaattgaccgtgtaatatttgcttacatgcatacttgatacgatcattaataagatttttatcattgctcgttatttcagaatcgtatatataaggagtaccatcgtgattcttaccagatattatacaaaatactatatataaaatatattgacccacgttagtaatcatgtaaatgtttaacgttttaaattttgtattcaatgatccattatcatacgctagcatggtcttatgatattcattctttaaaatataatattgtgttagccattgcattggggctcctaatggagattttttattctcatccattttaggataggctttcataaagtccctaataacttcgtgaataatgtttctatgttttctactgatgcatgtatttgcttcgatttttttatcccatgtttcatctatcatagatttaaacgcagtaatgctcgcaacattaacatcttgaaccgttggtacaattccgttccataaatttataatgttcgccatttatataactcattttttgaatatacttttaattaacaaaagagttaagttactcatatggacgccgtccagtctgaacatcaatctttttagccagagatatcatagccgctcttagagtttcagcgtgattttccaacctaaatagaacttcatcgttgcgtttacaacacttttctatttgttcaaactttgttgttacattagtaatctttttttccaaattagttagccgttgtttgagagtttcctcattgtcgtcttcatcggctttaacaattgcttcgcgtttagcctctggctttttagcagccgttgtagaaaaaaattcagttgctggaattgcaagatcgtcatctccggggaaaagagttccgtccatttaaagtacagattttagaaactgacactctgcgttatttatatttggtacaacacatggattataaatattgatgttaataacatcagaaaatgtaaagtctatacattgttgcatcgtgttaaattttctaatggatctagtattattgggtccaacttctgcctgaaatccaaatatggaagcggatacaaaaccgtttcctggataaaccacacatctccacttttgctttacatcagaaattgtgtcgttgacatcttgaactctcctatctaatgccggtgttccacctatagattttgaatattcgaatgctgcatgagtagcattaaattccttaatattgccataattttcatatattgagtaaccctggataaaaagtaaacacaccgcagccgtagctaccacaataaaaaaaattgatagagagttcatttataatctattagaagctgacaaaatttttttacacgcatcagacaatgctttaataaatagttcaacatctacttttgtcatatcgaaccgatggtatgattctaacctagaattacatccgaaaaagttgactatgttcatagtcattaagtcattaacaaacaacattccagactctggattataagacgatactgtttcgtcacaattacctaccttaatcatgtgattatgaatattggctattagagcaccttctaagaaatctataatatctttgaaacacgatttaaaatcaaaccacgaatatacttctacgaagaaagttagtttacccataggagaaataactataaatggagatctaaatacaaaatccggatctatgatagttttaacattattatattctctattaaatacctccacatctaaaaatgttaattttgaaactatgtcttcgtttattaccgtacctgaactaaacgctataagctctattgtttgagaactctttaaacgatattcttgaaatacatgtaacaaagtttcctttaactcggtcggtttatctaccatagttacagaatttgtatccttatctataatataataatcaaaatcgtataaagttatataattatcgcgttcagattgggatcttttcaaatagactaaaaaccccatttctctagtaagtatcttatgtatatgtttgtaaaatatcttcatggtgggaatatgctctaccgcagttagccattcctcattgacagcggtagatgtattagacaaaactattccaatgtttaacaagggccattttacgagattattaaatccttgtttgataaatgtagccaatgagggttcgagttcaacgacgattgaattctcttcccgcggatgctgcatgatgaacgacgggatgttgttcgattgatttggaattctttttcgactttttgtttatattaaatattttaaaatttatagcggatagcaattcatgtaccacggataatgtagacgcgtattgcgcatcgatatctttattattagataaatttatcaataaatgtgagaagtttgcctcgttaaggtcttccatttaaatattatataaacatttgtgtttgtatcttattcgtcttttatggaatagttttttactagtaaagctgcaattacacactttgtccgtaaaacataaatataaacaccagcttttatcaatcgttccaaaaagtcgacggcggacatttttaacatggcatctattttaaatacacttaggtttttggaaaaaacatcattttataattgtaacgattcaataactaaagaaaagattaagattaaacataagggaatgtcatttgtattttataagccaaagcattctaccgttgttaaatacttgtctggaggaggtatatatcatgatgatttggttgtattggggaaggtaacaattaatgatctaaagatgatgctattttacatggatttatcatatcatggagtgacaagtagtggaacaatttacaaattgggatcgtctatcgatagactttctctaaataggactattgttacaaaagttaataattataattatgatacattttttgacgatgatgattgatcgctattgcacaattttgtttttttactttctaatatagcgtttagattctttttcatgtgcgaatattgatttactaaaatatctatgtttaacttttgttctataacgtccttatcggcggtatcggtacatatacgtaattcaccttcacaaaatacggagtcttcgataataatagccaatcgattattggatctagctgtctgtatcatattcaacatgtttaatatatcctttcgtttcccctttacaggcatcgatcgtagcatattttccgcgtctgagatggaaatgttaaaactacaaaaatgcgtaatgttagcccgtcctaatattggtacgtgtctataagtttggcatagtagaataatagacgtgtttaaatgccttccaaagtttaagaattctattagagtattgcattttgatagtttatcgcctacatcatcaaaaataagtaaaaagtgtgctgattttttatgattttgtgcgacagcaatacatttttctatgttacttttagttcgtatcagattatattctagagattcctgactactaacgaaattaatatgatttggccaaatgtatccatcataatctggattataaacgggtgtaaacaagaatacatgtttatattttttaactagtgtagaaaacagagatagtaaatagatagtttttccagatccagatcctcccgttaaaaccattctaaacggcatttttaataaattttctcttgaaaattgtttttcttggaaacaattcataattatatttacagttactaaattaatttgataataaatcaaaatatggaaaactaaggtcgttagtagggaggagaacaaagaaggcacatcgtgacataaataacatttattatcatgatgacaccagaaaacgacgaagagcagacatctgtgttctccgctactgtttacagagacaaaattcagggaaagaataaacgcaaacgcgtgattggtctatgtattagaatatctatggttatttcactactatctatgattaccatgtccgcgtttctcatagtgcgcctaaatcaatgcatgtctgctaacgaggctgctattactgacgccgctgttgccgttgctgctgcatcatctactcatagaaaggttgcgtctagcactacgcaatatgatcacaaagaaagctgtaatggtttatattaccagggttcttgttatatattacattcagactaccagttattctcggatgctaaagcaaattgcactgcggaatcatcaacactacccaataaatccgatgtcttgactacctggctcattgattatgttaaggatacatggggatctgatggtaatccaattacaaaaactacatccgattatcaagattctgatgtatcacaagaagttagaaagtatttttgtgttaaaacaatgaactaatatttatttttgtacattaataaatgaaatcgcttaatagacaaactgtaagtaggtttaagaagttgtcggtgccggtcgctataatgatgatactctcaaccattattagtggcataggaacatttctgcattacaaagaagaactgatgcctagtgcttgcgccaatggatggatacaatacgataaacattgttatttagatactaacattaaaatgtctacagataatgcggtttatcagtgtcgtaaattacgagccagattgcctagaccggatactagacatctgagagtattgtttagtattttttataaagattattgggtaagtttaaaaaagaccaatgataaatggttagatattaataatgataaagatatagatattagtaaattaacaaattttaaacaactaaacagtacgacggatgctgaagcgtgttatatatacaagtctggaaaactggttaaaacagtatgtaaaagtactcaatctgtactatgtgttaaaaaattctacaagtgacaacaaaaaatgaattaataataagtcgttaacgtacgccgccatggacgccgcgtttgttattactccaatgggtgtgttgactataacagatacattgtatgatgatctcgatatctcaatcatggactttataggaccatacattataggtaacataaaaactgtccaaatagatgtacgggatataaaatattccgacatgcaaaaatgctactttagctataagggtaaaatagttcctcaggattctaatgatttggctagattcaacatttatagcatttgtgccgcatacagatcaaaaaataccatcatcatagcatgcgactatgatatcatgttagatatagaagataaacatcagccattttatctattcccatctattgatgtttttaacgctacaatcatagaagcgtataacctgtatacagctggagattatcatctaatcatcaatccttcagataatctgaaaatgaaattgtcgtttaattcttcattctgcatatcagacggcaatggatggatcataattgatgggaaatgcaatagtaattttttatcataaaagttgtaaagtaaataataaaacaataaatattgaactagtagtacgtatattgagcaatcagaaatgatgctggtacctcttatcacggtgaccgtagttgcgggaacaatattagtatgttatatattatatatttgtaggaaaaagatacgtactgtctataatgacaataaaattatcatgacaaaattaaaaaagataaagagttctaattccagcaaatctagtaaatcaactgatagcgaatcagactgggaggatcactgtagtgctatggaacaaaacaatgacgtagataatatttctaggaatgagatattggacgatgatagcttcgctggtagtttaatatgggataacgaatccaatgttatggcgcctagcacagaacacatttacgatagtgttgctggaagcacgctgctaataaataatgatcgtaatgaacagactatttatcagaacactacagtagtacttaatgaagataccaaacagaatcctaactattcatccaatcctttcgtaaattataataaaaccagtatttgtagcaagtcaaatccgttcattacagaactcaacaataaatttagtgagaataatccgtttagacgagcacatagcgatgattatcttaataagcaagaacaagatcatgaacacgatgatatagaatcattggtgtgattagtttcctttttataaaattgaagtaatatttagtattattgctgccgtcacgttgtacaaatggagatattccctgtattcggcatttctaaaattagcaattttattgctaataatgactgtagatattatatagatacagaacatcaaaaaattatatctgatgagatcaatagacagatggatgaaacggtacttcttaccaacatcttaagcgtagaagttgtaaatgacaatgagatgtaccatcttattcctcatagattatcgacgattatactctgtattagttctgtcggaggatgtgttatctctatagataatgacgtcaatggcaaaaatattctaacctttcccattgatcatgctgtaatcatatccccactgagtaaatgtgtcgtagttagcaagggtcctacaaccatattggttgttaaagcggatatacctagcaaacgattggtaacatcgtttacaaacgacatactgtatgtaaacaatctatcactgattaattattcgccgttgtctgtattcattattagacgagttaccgactatttggatagacacatatgcgatcagatatttgcgaataataagtggtattccattataaccatcgacaataagcagtttcctattccatcaaactgtataggtatgtcctctgccaagtacataaattctagcatcgagcaagatactttaatacatgtttgtaacctcgagcatccattcgacttagtatacaaaaaaatgcagtcgtacaattctgtacctatcaaggaacaaatattgtacggtagaattgataatataaatatgagcattagtatttctgtggattaatagatttctagtatggggatcattaatcatctctaatctctaaatacctcataaaacgaaaaaaaagctattatcaaatactgtacggaatggattcattctcttctctttttatgaaactctgttgtatatctactgataaaactggaagcaaaaaatctgataaaaagaataagaataagatcaaggattattataaaataacaatagttcctggttcctcttccacgtctactagctcgtggtattatacacatgcctagtaatagtctctttgcgttgacggaaagcagactagaaataacaggctaaaatgttcagacaccataatagttcccaacccagataataacagagtaccatcaacacattcctttaaactcaatcccaaacccaaaaccgttaaaatgtatccggccaattgatagtagataatgaggtgtacagcgcatgatgatttacacagtaaccaaaatgaaaatactttagtaattataagaaatatagatggtaacgtcatcatcaacaatccaataatatgccggagagtaaacattgacggataaaacaaaaatgctccgcataactctatcatggcaataacacaaccaaatacttgtaagattcctaaattagtagaaaatacaacggatatcgatgtataagtgatctcgagaaataataagaataaagtaatgcccgtaaagataaacatcaacattgtttggtaatcattaaaccaattagtatgaagttgaactaatttcacagtagattttattccagtattatccccgcatgtataagtacctggtaagatatctttatattccataatcaatgagacatcactatctgataacgaatgaagtctagcactagtatgccatttacttaatattgtcgtcttggaagttttattataagttaaaatatcatggttatccaatttccatctaatatactttgtcggattatctatagtacacggaataatgatggtatcattacatgctgtatactctatggtctttgtagttgttataacaaccaacgtatagaggtatatcaacgatattctaactcttgacattttttatttatttaaaatgatacctttgttatttattttattctattttgctaacggtattgaatggcataagtttgaaacgagtgaagaaataatttctacttacttattagacgacgtattatacacgggtgttaatggggcggtatacacattttcaaataataaactaaacaaaactggtttaactaataataattatataacaacatctataaaagtagaggatgcggaaccaataacggaaatcccaaatgttggaaaatagacggttcagacgacccaaaacatagaggtagaggatacgctccttatcaaaatagcaaagtaacgataatcagtcacaacggatgtgtactatctgacataaacatatcaaaagaaggaattaaacgatggagaagatttgacggaccatgtggttatgatttatacacggcggataacgtaattccaaaagatggtttacgaggagcattcgtcgataaagatggtacttatgacaaagtttacattcttttcactgatactatcggctcaaagagaattgtcaaaattccgtatatagcacaaatgtgcctaaacgacgaaggtggtccatcatcattgtctagtcatagatggtcgacgtttctcaaagtcgaattagaatgtgatatcgacggaagaagttatagacaaattattcattctagaactataaaaacagataatgatacgatactatatgtattcttcgatagtccttattccaagtccgcattatgtacctattctatgaataccattaaacaatctttttctacgtcaaaattggaaggatatacaaagcaattgccgtctccagctcctggtatatgtttaccagctggaaaagttgttccacataccacgtttgaagtcatagaaaaatataatgtactagatgatattataaagcctttatctaaccaacctatcttcgaaggaccgtctggtgttaaatggttcgatataaaggagaaggaaaatgaacatcgggaatatagaatatacttcataaaagaaaattctatatattcgttcgatacaaaatctaaacaaactcgtagctcgcaagtcgatgcgcgactattttcagtaatggtaacttcgaaaccgttatttatagcagatatagggataggagtaggaatgccacaaatgaaaaaaatacttaaaatgtaatcttaatcgagtacaccgcacgacaatgaacaaacataagacagattatgctggttatgcttgctgcgtaatatgcggtctaattgttggaattatttttacagcgacactattaaaagttgtagaacgtaaattagttcatacaccatcaatagataaaacgataaaagatgcatatattagagaagattgtcctactgactggataagctataataataaatgtatccatttatctactgatcgaaaaacctgggaggaaggacgtaatgcatgcaaagctctaaatccaaattcggatctaattaagatagagactccaaacgagttaagttttttaagaagcattagacgcggatattgggtaggagaatccgaaatattaaaccagacaaccccatataattttatagctaaaaatgccacgaagaatggaactaaaaaacggaaatatatttgtagtacaacgaatactcccaaactacatttttatcataccactacttcggttagatgttttagaaaaaaataaatatcgccgtaccgttcttgtttttataaaaataacaattaacaattatcaaattttttctttaatattttacgtggttgaccattcttggtggtaaaataatctcttagtgttggaatggaatgctgtttaatgtttccgcactcatcgtatattttgacgtatgcagtcacatcgtttacgcaatagtcagactgtagttctatcatgcttcctacatcagaaggaggaacagttttaaagtctcttggttttaatctattgccattagttttcatgaaatcctttgttttatccacttcacattttaaataaatgtccactatacattcttctgttaattttactagatcgtcatgggtcatagaatttataggttccgtagtccatggatccaaactagcaaacttcgcgtatacggtatcgcgattagtgtatacaccaactgtatgaaaattaagaaaacagtttaataaatcaacagaaatatttaatcctccgtttgatacagatgcgccatatttatggatttcggattcacacgttgtttgtctgaggtgttcgtctagtgttgcttctacgtaaacttcgattcccatatattctttattgtcagaatcgcataccgatttatcatcatacactgtttgaaaactaaatggtatacacatcaaaataataaataataacgagtacattctgcaatattgttatcgtaattggaaaaatagtgttcgagtgagttggattatgtgagtattggattgtatattttattttatattttatattttgtagtaagaatagaatgctaatgtcaagtttattccaatagatgtcttattaaaaaacatatataataaataacaatggctgaatggcataaaattatcgaggatatctcaaaaaataataagttcgaggatgccgccatcgttgattacaagactacaaagaatgttctagctgctattcctaacagaacatttgccaagattaatcctctcatcactaatcgtaatattctaaaacctcttattggtcagaaatattgtattgtatatactaactctctaatggatgagaacacgtatgctatggagttgcttactgggtacgcccctgtatctccgatcgttatagcgagaactcataccgcacttatatttttgatgggtaagccaacaacatccagacgtgacgtgtatagaacgtgtagagatcacgctacccgtgtacgtgcaactggtaattaaaataaaaagtaatattcatatgtagtgtcaattttaaatgatgatgatgaaatggataatatccatattgacgatgtcaataatgccggtattggcatacagttcatcgatttttagatttcattcagaggatgtggaattatgttatgggcatttgtattttgataggatctataatgtagtaaatataaaatataatccgcatattccatatagatataattttattaatcgcacgttaaccgtagatgaactagacgataatgtcttttttacacatggttattttttaaaacacaaatatggttcacttaatcctagtttgattgtctcattatcaggaaacttaaaatataatgatatacaatgctcagtaaatgtatcgtgtctcattaaaaatttggcaacgagtacatctactatattaacatctaaacataagacttattctctacatcggtccacgtgtattactataataggatacgattctattatatggtataaagatataaatgacatctatgattttactgcaatatgtatgctaatagcgtctacattgatagtgaccatatacgtgtttaaaaaaataaaaatgaactcttaattatgctatgctattagaaatggataaaatcaaaattacggttgattcaaaaattggtaatgttgttaccatatcgtataacttggaaaagataactattgatgtcacacctaaaaagaaaaaagaaaaggatgtattattagcgcaatcagttgctgtcgaagaggcaaaagatgtcaaggtagaagaaaaaaatattatcgatattgaagatgacgatgatatggatgtagaaagcgcataatacgatctataaaaataagtatataaatactttttatttactgtactcttactgtgtagtggtgataccctactcgattatttttttaaaaaaaaatacttattctgattcttctagccatttccgtgttcgttcgaatgccacatcgacgttaaagataggggagtagttgaaatctagttctgcattgttggtacgcacctcaaatgtagtgttggatatcttcaacgtatagttgttgagtagtgatggttttctaaatagaattctcttcatatcattcttgcacgcgtacatttttagcatccatcttggaatcctagatccttgttctattcccaatggtttcatcaatagaagattaaacatatcgtacgaacacgatggagagtaatcgtagcaaaagtaagcatttcctttaatctcagatcccggatactggatatattttgcagccaacacgtgcatccatgcagcatttcctacatatacccggctatgtaccgcgttatcatcgactgtacgatacataatgttaccgtgttgcttacattgctcgtaaaagactttcatcaatttgtctccttctccgtaaattccagtgggtcttaggcaacaagtatacaattttgctccattcatgattacggaattattggctttcataaccagttgctcggccatacgtttactttttgcgtatacatgtcctggtgatatatcataaagggtatgctcatggccgatgaatggatcaccgtgtttattgggtcctattgcttccatgctactagtatagatcaaatacttgattcctaggtccacacaagctgccaatatagtctgtgttccataatagtttactttcatgatttcattatcggtgtattttccaaatacatccactagagcagctgtatgaataatcagatttaccccatctagcgcttctcttaccttatcaaagtcgtttatatcacattgtatatagtttataaccttaactttcgaggttattggttgtggatcttctacaatatctatgactctgatttcttgaacatcatctgcactaattaacagttttactatatacctgcctagaaatccggcaccaccagtaaccgcgtacacggccattgctgccactcataatatcagactacttattctattttactaaataatggctgtttgtataatagaccacgataatatcagaggagttatttactttgaaccagtccatggaaaagataaagttattggattaaaatccggaacgtatagtttgataattcatcgttacggagatattagtcaaggatgtgattccataggcagtccagaaatatttatcggtaacatctttgtaaacagatatggtgtagcatatgtttatttagatacagatgtaaatatatctacaattattggaaaggcgttatctatttcaaaaaatgatcagagattagcgtgtggagttattggtatttcttacataaatgaaaagataatacattttcttacaattaacgagaatggcgtttgatatatcagttaatgcgtctaaaacaataaatgcattagtttacttttctactcagcaaaataaattagtcatacgtaatgaagttaatgatacacactacactgtcgaatttgatagggacaaagtagttgacacgtttatttcatataatagacataatgactccatagagataagaggggtgcttccagaggaaactaatattggttgcgcggttaatacgccggttagtatgacttacttgtataataagtatagttttaaactgattttagcagaatatataagacacagaaatactatatccggcaatatttattcggcattgatgacactagatgatttggctattaaacagtatggagacattgatctattatttaatgagaaacttaaagtagactccgattcgggactatttgactttgtcaactttgtaaaggatatgatatgttgtgattctagaatagtagtagctctatctagtctagtatctaaacattgggaattgacaaataaaaaatataggtgtatggcattagccgaacatatatctgatagtattccaatatctgagctatctagactacgatacaatctatgtaagtatctacgcgggcacactgagagcatagaggatgaatttgattattttgaagacgatgattcgtctacatgttctgccgtaaccgacagggaaacggatgtataattttttttatagcgtgaaggatatgataaaaaatataattgttgtatttatcccattccaatcaccttatatgattctgtaacacaatgaaggagtcttatagatgtatagaggtcagatactggtttgataaactgtttattccacataagtatgtttgactttatggttagacccgcatactttaacaaatcactgaaaattggagttaggtattgacctctcagaatcagttgccgttctggaacattaaatgtattttttatgatatactccaacgcatttatgtgggcatacaacaagtcattactaatggagtattccaagagaagagatttcaacagactgtttatgaactcgaatgccgcctcattgtcgcttatattgatgatgtcgaattctcccaatatcatcaccgatgagtagctcatcttgttatcgggatccaagttttctaaagatgtcattaaaccctcgatcatgaatggatttatcatcatcgtttttatgttggacatgagcttagtccgtttgtccacatctatagacgacgatttctgaattatttcatatatccctctctttaactccaggaacttgtcaggatggtctactttaatatgttctcgtctaagagatgaaaatctttggatggttgcacgcgacttttctctaaaggatcctctcttaaatgaatccatcttatccttggacaagatggacagtctattttccttagatggtttaatatttttgttacccatgatctataaaggtagacctaatcgtctcggatgaccatatatttattttcagttttattatacgcataaattgtaaaaaatatgttaggtttacaaaaatgtctcgtggggcattaatcgtttttgaaggattggacaaatctggaaaaacaacacaatgtatgaacatcatggaatctataccggcaaacacgataaaatatcttaactttcctcagagatccactgtcactggaaagatgatagatgactatctaactcgtaaaaaaacctataatgatcatatagttaatctattattttgtgcaaatagatgggagtttgcatcttttatacaagaacaactagaacagggaattactttaatagttgatagatacgcattctctggagtagcgtatgccgccgctaaaggcgcgtcaatgactctcagtaagagttatgaatctggattgcctaaacccgacttagttatattcttggaatctggtagcaaagaaattaatagaaacgtcggcgaggaaatttatgaagatgttacattccaacaaaaggtattacaagaatataaaaaaatgattgaagaaggagatattcattggcaaattatttcttctgaattcgaggaagatgtaaagaaggagttgattaagaatatagttatagaggctatacacacggttactggaccagtggggcaactgtggatgtaatagtgaaattacattttttataaatggatgaagcatattactctggcaacttggaatcagtactcggatacgtgtccgatatgcataccgaactcgcatcaatatctcaattagttattgccaagatagaaactatagataatgatatattaaacaaggacattgtaaattttatcatgtgtagatcaaacttggataatccatttatctctttcctagatactgtatatactattatagatcaagagatctatcagaccgaattgattaattcattagacgacaatgaaattatcgattgtatagttaacaagtttatgagcttttataaggataacctagaaaatatagtagatgctatcattactctaaaatatataatgaataatccagattttaaaactacgtatgccgaagtactcggttccagaatagcggatatagatattaaacaagtgatacgtgagaatatactacaattgtctaataatatccgcgaacgatatttgtgaaaatattaaaaaaaaatactttttttattaaatgacgtcgcttcgcgaatttagaaaattatgctgtgatatatatcacgcatcaggatataaagaaaaatctaaattaattagagactttataacagatagggatgataaatatttgatcattaagctattgcttcccggattagacgatagaatttataacatgaacgataaacaaattataaaattatatagtataatatttaaacaatctcaggaagatatgctacaagatttaggatacggatatataggagacactattaggactttcttcaaagagaacacagaaatccgtccacgagataaaagcattttaactttagaagaagtggatagttttttaactacgttatcatccgtaactaaagaatcgcatcaaataaaattattgactgatatcgcatccgtttgtacatgtaatgatttaaaatgtgtagtcatgcttattgataaagatctaaaaattaaagcgggccctcggtacgtacttaacgctattagtcctcatgcctatgatgtgtttagaaaatctaataacttgaaagagataatagaaaatgcatctaaacaaaatctagactctatatctatttctgttatgactccaattaatcccatgttagcggaatcgtgtgattctgtcaataaggcgtttaaaaaatttccatcaggaatgtttgcggaagtcaaatacgatggtgaaagagtacaagttcataaaaataataacgagtttgccttctttagtagaaacatgaaaccagtactctctcataaagtggattatctcaaagaatacataccgaaagcatttaaaaaagctacgtctatcgtattggattctgaaattgttcttgtagacgaacataatgtaccgctcccgtttggaagtttaggtatacacaaaaagaaagaatataaaaactctaacatgtgtttgttcgtgtttgactgtttgtactttgatggattcgatatgacggacattccattgtacgaacgaagatcttttctcaaagatgttatggttgaaatacccaatagaatagtattctcagagttgacgaatattagtaacgagtctcagttaactgacgtattggatgatgcactaacgagaaaattagaaggattggtcttaaaagatattaatggagtatacgaaccgggaaagagaagatggttaaaaataaagcgagactatttgaacgagggttccatggcagattctgccgatttagtagtactaggtgcttactatggtaaaggagcaaagggtggtatcatggcagtctttctaatgggttgttacgacgatgaatccggtaaatggaagacggttaccaagtgttcaggacacgatgataatacgttaagggagttgcaagaccaattaaagatgattaaaattaacaaggatcccaaaaaaattccagagtggttagtagttaataaaatctatattcccgattttgtagtagaggatccaaaacaatctcagatatgggaaatttcaggagcagagtttacatcttccaagtcccataccgcaaatggaatatccattagatttcctagatttactaggataagagaggataaaacgtggaaagaatctactcatctaaacgatttagtaaacttgactaaatcttaatagttacatacaaattaaaataacactatttagttggtggtcgccatggatggtgttattgtatactgtctaaacgcgttagtaaaacatggcgaggaaataaatcatataaaaaatgatttcatgattaaaccatgttgtgaaaaagtcaagaacgttcacattggcggacaatctaaaaacaatacagtgattgcagatttgccatatatggataatgcggtatccgatgtatgcaattcactgtataaaaagaatgtatcaagaatatccagatttgctaatttgataaagatagatgacgatgacaagactcctactggtgtatataattattttaaacctaaagatgccattcctgttattatatccataggaaaggatagagatgtttgtgaactattaatctcatctgataaagcgtgtgcgtgtatagagttaaattcatataaagtagccattcttcccatggatgtttccttttttaccaaaggaaatgcatcattgattattctcctgtttgatttctctatcgatgcggcacctctcttaagaagtgtaaccgataataatgttattatatctagacaccagcgtctacatgacgagcttccgagttccaattggttcaagttttacataagtataaagtccgactattgttctatattatatatggttgttgatggatctgtgatgcatgcaatagctgataatagaacttacgcaaatattagcaaaaatatattagacaatactacaattaacgatgagtgtagatgctgttattttgaaccacagattaggattcttgatagagatgagatgctcaatggatcatcgtgtgatatgaacagacattgtattatgatgaatttacctgatgtaggcgaatttggatctagtatgttggggaaatatgaacctgacatgattaagattgctctttcggtggctggtatttggaaagttttataggtagttgatagaacaaaatacataattttgtaaaaataaatcactttttatactaatatgacacgattaccaatacttttgttactaatatcattagtatacgctacaccttttcctcagacatctaaaaaaataggtgatgatgcaactttatcatgtaatcgaaataatacaaatgactacgttgttatgagtgcttggtataaggagcccaattccattattcttttagctgctaaaagcgacgtcttgtattttgataattataccaaggataaaatatcttacgactctccatacgatgatctagttacaactatcacaattaaatcattgactgctagagatgccggtacttatgtatgtgcattctttatgacatcgcctacaaatgacactgataaagtagattatgaagaatactccacagagttgattgtaaatacagatagtgaatcgactatagacataatactatctggatctacacattcaccggaaactagttctgagaaacctgattatatagataattctaattgctcgtcggtattcgaaatcgcgactccggaaccaattactgataatgtagaagatcatacagacaccgtcacatacactagtgatagcattaatacagtaagtgcatcatctggagaatccacaacagacgagactccggaaccaattactgataaagaagaagatcatacagttacagacactgtctcatacactacagtaagtacatcatctggaattgtcactactaaatcaaccaccgatgatgcggatctttatgatacgtacaatgataatgatacagtaccatcaactactgtaggcggtagtacaacctctattagcaattataaaaccaaggactttgtagaaatatttggtattaccgcattaattatattgtcggccgtggcaatattctgtattacatattatatatataataaacgttcacgtaaatacaaaacagagaacaaagtctagatttttgacttacataaatgtctgggatagtaaaatctatcatattgagcgggccatctggtttaggaaagacagccatagccaaaagactatgggaatatatttggatttgtggtgtcccataccactagatttcctcgtcctatggaacgagaaggtgtcgattaccattacgttaacagagaggccatctggaagggaatagccgccggaacatactgagtttttaggaaatatttacggaacttctaaaactgctgtgaatacagcggctattaataatcgtatttgtgtgatggatctaaacatcgacggtgttagaagttttaaaaatacttacctaatgccttactcggtgtatataagacctacctctcttaaaatggttgagaccaagcttcgttgtagaaacactgaagcggatgatgagattcatcgtcgtgtgatgttggcaaaaactgacatggatgaggcaggtgaagccggtctattcgacactattatcattgaagatgatgtgaatttagcatatagtaagttaattcagatactacaggaccgtattagaatgtattttaacactaattagagacttaagacttaaaacttgataattaataatataactcgtttttatatgtggctatttcaacgtctaatgtattagttaaatattaaaacttaccacgtaaaacttaaaatttaaaatgatatttcattgacagatagatcacacattatgaactttcaaggacttgtgttaactgacaattgcaaaaatcaatgggtcgttggaccattaataggaaaaggtggatttggtagtatttatactactaatgacaataattatgtagtaaaaatagagcccaaagctaacggatcattatttaccgaacaggcattttatactagagtacttaaaccatccgttatcgaagaatggaaaaaatctcacaatataaagcacgtaggtcttatcacgtgcaaggcatttggtctatacaaatccattaatgtggaatatcgattcttggtaattaatagattaggtgcagatctagatgcggtgatcagagccaataataatagattaccaaaaaggtcggtgatgttgatcggaatcgaaatcttaaataccatacaatttatgcacgagcaaggatattctcacggagatattaaagcgagtaatatagtcttggatcaaatagataagaataaattatatctagtggattacggattggtttctaaattcatgtctaatggcgaacatgttccatttataagaaatccaaataaaatggataacggtactctagaatttacacctatagattcgcataaaggatacgttgtatctagacgtggagatctagaaacacttggatattgtatgattagatggttgggaggtatcttgccatggactaagatatctgaaacaaagaattgtgcattagtaagtgccacaaaacagaaatatgttaacaatactgcgactttgttaatgaccagtttgcaatatgcacctagagaattgctgcaatatattaccatggtaaactctttgacatattttgaggaacccaattacgacaagtttcggcacatattaatgcagggtgtatattattaagtgtggtgtttggttgatgtaaaatttttgtcgataaaaattaaaaaataacttaatttattattgatctcgtgtgtacaaccgaaatcatggcgatgttttacgcacacgctctcggtgggtacgacgagaatcttcatgcctttcctggaatatcatcgactgttgccaatgatgtcagtttataataacaagtatgacattgtaaaagacaaatatatgtggtgttacagtcaggtgaacaagagatatattggagcactgctgcctatgtttgagtgcaatgaatatctacaaattggagatccgatccatgatcaagaaggaaatcacatatcgccacaaaaactactatgctctaagcggaatcgggtacgagagtctagacttgtgtttggaaggagtagggattcatcatcacgtacttgaaacagaaaacgctgtatatggaaaagttcaacatgattattctactatcaaagagaaggccaaagaaatgaatgcactcagttcaggacctatcatcgattaccacgtctggataggagattgtatctgtcaagttactgctgtggacgtacatggaaaggaaattatgagaatgagattcaaaaagggtgcggtgcttccgatcccaaatctggtaaaagttaaacttggggagaatgatacagaaaatctttcttctactatatcggcggcaccatcgaggtaaccacctctctggaagacagtgtgaatcatgtactcatgaaacgtttggaatctatacgccatatgtggtctgttgtatatgatcattttgatattgtgaatggtaaagaatgctgttatgtgcatacgcatttgtctaatcaaaatcttataccgagtactgtaaaaacaaatttgtacatgaagactatgggatcatgcattcaaatgagtatcttagcgaactgaaggaatcaggtggatggagtcccagaccagaaatgcaggaatttgaatatccagatggagtggaagacactgaatcaattgagagattggtagaggagttcttcaatagatcagaacttcaggctggtaaatctattaatgttaaacatacatctgtttcagctaagcaactaagaacacgtatactctcatcttttgccaacacagagggtggatatttgttcattggagttgataataatacacacaaagtatttggattcacggtgggttacgactacctcagactgatagagaatgatatagaaaagcatatcaaaagactttgtgttgtgtatttctgtgagaagaaagaggacatcaagtacacgtgtcgattcatcaaggtatataaacctggggatgaggctacctcgacatacgtgtgcgctatcaaagtggaaagatgctgttgtgctgtgtttgcagattggccagaatcatggtatcaagaagtattctccagatgaataggtgtcacatataaaattttaattaatgtaactatagagaacaaataataggttgtaatatcatatagacaataactaacaattaattagtaactgttatctctttttaactaactaactatacctattaatacatcgtaattatagttcttaacatctattaatcattgattcgcttctttaattttttataaaccaacattgttaattgaaaagggataacatgttacagaatataaattatatatggattttttttaaaaaggaaatacttgactggagtgtatatttatctcttcattatatagcacgcgtgttttccaatttttccacatcccatataatacaggattataatctcgttcgaacatacgagaaagtggataaaacaatagttgattttttatctaggttgccaaatttattccatattttagaatatggggaaaatattctacatatttattctatggatgatgctaatacgaatattataattttttttctagatagagtattaaatattaataagaacgggtcatttatacacaatctcaggttatcatcatccattaatataaaagaatatgtatatcaattagttaataatgatcatccagataataggataagactaatgcttgaaaatggacgtagaacaagacattttttgtcctatatatcagatacagttaatatctatatatgtattttatatagatgccgaagacagttacggttgtacattattacatagatgtatatatcactataagaaatcagaatcagaatcagaatcatacaatgaattaattaagatattgttaaataatggatcagatgtagataaaaaagatacgtacggaaacacaccttttatcctattatgtaaacacgatatcaacaacgtggaattgtttgagatatgtttagagaatgctaatatagactctgtagactttaatagatatacacctcttcattatgtctcatgtcgtaataaatatgattttgtaaagttattaatttctaaaggagcaaatgttaatgcgcgtaataaattcggaactactccattttattgtggaattatacacggtatctcgcttataaaactatatttggaatcagacacagagttagaaatagataatgaacatatagttcgtcatttaataatttttgatgctgttgaatctttagattatctattatccagaggagttattgatattaactatcgtactatttacgacgctgtcagttataatgcgtataatacgttggtctatctattaaacagaaatggtgattttgagacgattactactagtggatgtacatgtatttcggaagcagtcgcaaacaacaacaaaataataatggaagtactattgtctaaacgaccatctttgaaaattatgatacagtctatgatagcaattactaaacataaacagcataatgcagatttattgaaaatgtgtataaaatatactgcgtgtatgaccgattatgatactcttatagatgtacaatcactacagcaatataaatggtatattttaagatgtttcgatgaaatagatatcatgaagagatgttatataaaaaataaaactgtattccaattagttttttgtatcaaagacattaatactttaatgagatacggtaaacatccttctttcgtgaagtgcactagtctcgacgtatacggaagtcgtgtacgtaatatcatagcatctattagatatcgtcagagattaattagtctattatccaagaagctggatcctggagataaatggtcgtgttttcctaacgaaataaaatataacgataacgaactgtccacatatctaaaaatcttataaacactattaaaatataaaatcacactacatcattgtttccttttagtgctcgacagtgtatactatttttaacgctcataaataaaaatgaaaacgatttccgttgttacgttgttatgcgtactacctgctgttgtttattcaacatgtactgtacccactatgaataacgctaaattaacgtctaccgaaacatcgtttaataataaccagaaagttacgtttacatgtgatcagggatatcattcttcggatccaaatgctgtctgcgaaacagataaatggaaatacgaaaatccatgcaaaaaaatgtgcacagtttctgattacatctctgaactatataataaaccgctatacgaagtgaattccaccatgacactaagttgcaacggcgaaacaaaatattttcgttgcgaagaaaaaaatggaaatacttcttggaatgatactgttacgtgtcctaatgcggaatgtcaacctcttcaattagaacacggatcgtgtcaaccagttaaagaaaaatactcatttggggaatatataactatcaactgtgatgttggatatgaggttattggtgcttcgtacataagttgtacagctaattcttggaatgttattccatcatgtcaacaaaaatgtgatataccgtctctatctaatggattaatttccggatctacattttctatcggtggcgttatacatcttagttgtaaaagtggttttatactaacgggatctccatcatccacatgtatcgacggtaaatggaatcccatactcccaacatgtgtacgatctaacgaaaaatttgatccagtggatgatggtcccgacgatgagacagatttgagcaaactctcgaaagacgttgtacaatatgaacaagaaatagaatcgttagaagcaacttatcatataatcatagtggcgttaacaattatgggcgtcatatttttaatctccgttatagtattagtttgttcctgtgacaaaaataatgaccaatataagttccataaattgctaccgtgaatataaatccgttaaaataatgaataattaataattaataatttaataacaaacaagtatcaaaagattaaagacttatagctagaatcaattgagatgtcttcttcagtggatgttgatatctacgatgccgttagagcatttttactcaggcactattataacaagagatttattgtgtatggaagaagtaacgccatattacataatatatacaggctatttacaagatgcgccgttataccgttcgatgatatagtacgtactatgccaaatgaatcacgtgttaaacaatgggtgatggatacacttaatggtataatgatgaatgaacgcgatgtttctgtaagcgttggcaccggaatactattcatggaaatgtttttcgattacaataaaaatagtatcaacaatcaactaatgtatgatataattaatagcgtatctataattctagctaatgagagatatagaagcgcttttaacgacgatggtatatacatccgtagaaatatgattaacaagttgtacggatacgcatctctaactactattggcacgatcgctggaggtgtttgttattatctgttgatgcatctagttagtttgtataaataattatttcaatatactagttaaaattttaagattttaaatgtataaaaaactaataacgtttttatttgtaataggtgcattagcatcctattcgaataatgagtacactccgtttaataaactgagtgtaaaactctatatagatggagtagataatatagaaaattcatatactgatgataataatgaattggtgttaaattttaaagagtacacaatttctattattacagagtcatgcgacgtcggatttgattccatagatatagatgttataaacgactataaaattattgatatgtctactattcaacgcagaggtcacacgtgtagaatatctaccaaattatcatgccattatgataagtacccttatattcacaaatatgatggtgatgagcgacaatattctattactgcagagggaaaatgctataaaggaataaaatatgaaataagtatgatcaacgatgatactctattgagaaaacatactcttaaaattggatctacttatatatttgatcgtcatggacatagtaatacatattattcaaaatatgatttttaaaaatttaaaatatattatcacttcagtgacagtagtcaaataacaaacaacaccatgagatatattataattctcgcagttttgttcattaatagtatacacgctaaaataactagttataagtttgaatccgtcaattttgattccaaaattgaatggactggggatggtctatacaatatatcccttaaaaattatggcatcaagacgtggcaaacaatgtatacaaatgtaccagaaggaacatacgacatatccgcatttccaaagaatgatttcgtatctttctgggttaaatttgaacaaggcgattataaagtggaagagtattgtacgggaccaccgactgtaacattaactgaatacgacgaccatccgtatgctactagaggtagcaaaaagattcctatttacaaacgcggtgacatgtgtgatatctacttgttgtatacggctaacttcacattcggagattctaaagaaccagtaccatatgatatcgatgactacgattgcacgtctacaggttgcagcatagactttgtcacaacagaaaaagtgtgcgtgacagcacagggagccacagaagggtttctcgaaaaaattactccatggagttcgaaagtatgtctgacacctaaaaagagtgtatatacatgcgcaattagatccaaagaagatgttcccaatttcaaggacaaaatggccagagttatcaagagaaaatttaactaaatttctcggtagcacatcaaatgatgttaccacttttcttagcatgcttaacttgactaaatattcataactaatttttattaatgatacaaaaacgaaataaaactgcatattatacactggttaacgcccttataggctctaaccattttcaagatgaggtccctgattatagtccttctgttcccctctatcatctactccatgtctattagacgatgtgagaagactgaagaggaaacatggggattgaaaatagggttgtgtataattgccaaagatttctatcccgaaagaactgattgcagtgttcatctcccaactgcaagtgaaggcaatggattcagggatatacgaaacaccgataaattataaaaaaagcaatgtgtccgctgtttccgttaataatactattttcgtaactggcggattattcataaataactctaatagcacgatcgtggttaacaatatggaaaaacttgacatttataaagacaaacaatggtcgattatagaaatgcctatggctagggtatatcacggcatcgactcgacatttggaatgttatattttgccggaggtctatccgttaccgaacaatatggtaatttagagaaaaacaacgagatatcttgttacaatcctagaacgaataagtggtttgatatttcatatactatttataagatatccatatcatcattgtgtaaactaaataacgtcttctatgtatttagtaaggacattggatatgtggaaaagtatgatggtctccccgctataaaggcattatcaacttctccttattgattgaaaatgaaaatataaatagtttttatgtatagcagtattaccctatagttttattgcttactactaacatggatacagatacagatgttacaaatgtagaagatatcatgaatgaaatagatagagagaaagaagaaatactaaaaaatgtagaaattgaaaataataaaaacattaacaagaatcatcccaatgaatatattagagaagcactcgttattaatacaagtagtaatagtgattccattgataaagaagttatagaatgtatcagtcacgatgtaggaatatagatcatatctactaatttttataatcaatacaaaacataaaaaacaactcgttattacatagcaggcatggaatccttcaagtattgttttgataacgatggcaagaaatggattatcggaaatactttatattctggtaattcaatactctataaggtcagaaaaaatttcactagttcgttctacaattacgtaatgaagatagatcacaaatcacacaagccattgttgtctgaaatacgattctatatatctgtattggatcctttgactatcgacaactggacacgggaacgtggtataaagtatttggctattccagatctgtatggaattggagaaaccgatgattatatgttcttcgttataaagaatttgggaagagtattcgccccaaaggatactgaatcagtcttcgaagcatgcgtcactatgataaacacgttagagtttatacactctcgaggatttacccatggaaaaatagaaccgaggaatatactgattagaaataaacgtctttcactaattgactattctagaactaacaaactatacaagagtggaaactcacatatagattacaacgaggacatgataacttcaggaaatatcaattatatgtgtgtagacaatcatcttggagcaacagtttcaaaacgaggagatttagaaatgttgggatattgcatgatagaatggttcggtggcaaacttccatggaaaaacgaaagtagtataaaagtaataaaacaaaaaaaagaatataaaaaatttatagctactttctttgaggactgttttcctgaaggaaatgaacctctggaattagttagatatatagaattagtatacacgttagattattctcaaactcctaattatgacagactacgtagactgtttatacaagattgaaatattctttttttatagagtgtggtagtgttacggatatctaatattaatattagactatctctatcgcgctacacgaccaatatcgattactatggatatcttctatgaaaggagagaatgtattcatttctccagcgtcaatctcgtcagtattgacaatactgtattatggagctaatggatccactgctgaacagctatcaaaatatgtagaaaaggaggagaacacggataaggttagcgctcagaatatctcattcaaatccatgaataaagtatatgggcgatattctgccgtgtttaaagattcctttttgagaaaaattggcgataagtttcaaactgttgacttcactgattgtcgcactatagatgcaatcaacaagtgtgtagatatctttactgaggggaaaatcaatccactattggatgaacaattgtctcctagcaattagtgccgtatactttaaagcaaaatggttgacgccattcgaaaaggaatttaccagtgattatcccttttacgtatcaccaacggaaatggtagacgtaagtatgatgtctatgtacggcgagctatttaatcacgcatctgtaaaagaatcattcggtaacttttcaatcatagaactgccatatgttggagatactagtatgatggtcattcttccagacaagattgatggattagaatccatagaacaaaatctaacagatacaaattttaagaaatggtgtaactctctggaagctacgtttatcgatgttcacattcccaagtttaaggtaacaggctcgtataatctggtggatactctagtaaagtcaggactgacagaggtgttcggttcaactggagattatagcaatatgtgtaatttagatgtgagtgtcgacgctatgatccacaaaacgtatatagatgtcaatgaagagtatacagaagcagctgcagcaacttgtgcactggtgtcagactgtgcatcaacaattacaaatgagttctgtgtagatcatccgttcatctatgtgattaggcatgttgatggaaaaatttttttcgttggtagatattgctctccgacaactaattgttaaccattttttttaaaaaaatagaaaaaacatgtggtattagtgcaggtcgttattcttccaattgcaattggtaagatgacggccaactttagtacccacgtcttttcaccacagcactgtggatgtgacagactgaccagtattgatgacgtcaaacaatgtttgactgaatatatttattggtcgtcctatgcataccgcaacaggcaatgcgctggacaattgtattccacactcctctcttttagagatgatgcggaattagtgttcatcgacattcgcgagctggtaaaaaatatgccgtgggatgatgtcaaagattgtgtagaaatcatccgttgttatataccggatgagcaaaaaaccatcatcggactttgtgcatatgctgctacttactggggaggtgaagaccatcccactagtaacagtctgaacgcattgtttgtgatgcttgagatgctaaattacgtggattataacatcatattccggcgtatgaattgatgagttgtacatcttgacattttcttctttcttctcttctccctttcccagaaacaaactttttttacccactataaaataaaatgagtatactacctgttatatttctttctatatttttttattcttcattcgttcagacttttaacgcgcctgaatgtatcgacaaagggcaatattttgcatcattcatggagttagaaaacgagccagtaatcttaccatgtcctcaaataaatacgctatcatccggatataatatattagatattttatgggaaaaacgaggagcggataatgatagaattataccgatagataatggtagcaatatgctaattctgaacccgacacaatcagactctggtatttatatatgcattaccacgaacgaaacctactgtgacatgatgtcgttaaatttgacaatcgtgtctgtctcagaatcaaatatagatcttatctcgtatccacaaatagtaaatgagagatctactggcgaaatggtatgtcccaatattaatgcatttattgctagtaacgtaaacgcagatattatatggagcgggcatcgacgccttagaaataagagacttaaacaacggacacctggaattattaccatagaagatgttagaaaaaatgatgctggttattatacatgtgttttagaatatatatacggtggcaaaacatataacgtaaccagaattgtaaaattagaggtacgggataaaataataccttctactatgcaattaccagaaggtgttgtaacttcaataggtagtaatttgactattgcgtgtagagtatcgttgagacctcccacaacggatgcagacgtcttttggataagtaatggtatgtattacgaagaagatgatggggacggagacggtagaataagtgtagcaaataaaatctatatgaccgataagagacgtgttattacatcccggttaaacattaatcctgtcaaggaagaagatgctacaacgtttacgtgtatggcgtttactattcctagcatcagcaaaacagttactgttagtataacgtgaatgtatgttgttacatttccatgtcaattgagtttataagaatttttatacattatcttccaacaaacaattgacgaacgtattgctatgattaactcccacgatactatgcatattattaatcattaacttgcagactatacctagtgctattttgacatactcatgttcttgtgtaattgcggtatctatattattaaagtacgtaaatctagctatagttttattatttaattttagataatataccgtctccttatttttaaaaattgccacatcctttattaaatcatgaatgggaatttctatgtcatcgttaatatattgtgaacaacaagagcagatatctataggaaagggtggaatgcgatacattgatctatgtagttttaaaacacacgcgaactttgaagaatttatataaatcattccatcgatacatccttctatgttgacatgtatatatccaggaattcttttattaatgtcaggaaatgtataaactaaaacattgcccgaaagcggtgcctctatctgcgttatatccgttcttaacttacaaaatgtaaccaatacctttgcatgacttgttttgttcggcaacgttagtttaaacttgacgaatggattaattacaatagcatgatccgcgcatctattaagtttttttactttaacgcccttgtatgtttttacagagactttatctaaatttctagtgcttgtatgtgttataaatataacgggatatagaactgaatcacctaccttagatacccaattacattttatcagatccagataataaacaaattttgtcgccctaactaattctatattgttatatattttacaattggttatgatatcatgtaataacttggagtctaacgcgcatcgtcgtacgtttatacaattgtgatttagtgtagtatatctacacatgtatttttccgcactatagtattctggactagtgataaaactatcgttatatctgtcttcaatgaactcatcgagatattgctctctgtcatattcatacacctgcataaactttctagacatcttacaatccgtgttattttaggatcatatttacatatttacgggtatatcaaagatgttagattagttaatgggaatcgtctataataatgaatattaaacaattatatgaggacttttaccacaaagcatcataaaaatgagtcgtcgtctgatttatgttttaaatatcaaccgcgaatcaactcataaaatacaagagaatgaaatatatacatattttagtcattgcaatatagaccatacttctacagaacttgattttgtagttaaaaactatgatctaaacagacgacaacctgtaactgggtatactgcactacactgctatttgtataataattactttacaaacgatgtactgaagatattattaaatcatggagtggatgtaacgatgaaaaccagtagcggacgtatgcctgtttatatattgcttactagatgttgtaatatttcacatgatgtagtgatagatatgatagacaaagataaaaaccacttatcgcatagagactattccaacctactactagagtatataaaatctcgttacatgttattgaaggaagaggatatcgatgagaacatagtatccactttattagataagggaatcgatcctaactttaaacaagacggatatacagcgttacattattattatttgtgtctcgcacacgtttataaaccaggtgagtgtagaaaaccgataacgataaaaaaggccaagcgaattatttctttgtttatacaacatggagctaatctaaacgcgttagataattgtggtaatacaccattccatttgtatcttagtattgaaatgtgtaataatattcatatgactaaaatgctgttgacttttaatccgaatttcaaaatatgtaataatcatggattaacgcctatactatgttatataacttccgactacatacaacacgatattcttgttatgttaatacatcactatgaaacaaatgttggagaaatgccgatagatgagcgtcgtataatcgtattcgagtttatcaaaacatattctacacgtccggcagattcgataacttatttgatgaataggtttaaaaatatagatatttatacccgctatgaaggaaagacattattacacgtagcatgtgaatataataatacacacgtaatagattatcttatacgtatcaacggagatataaatgcgttaaccgacaataacaaacacgctacacaactcattatagataacaaagaaaattccccatataccattaattgtttactgtatatacttagatatattgtagataagaatgtgataagatcgttggtggatcaacttccatctctacctatcttcgatataaaatcatttgagaaattcatatcctactgtatacttttagatgacacattttacaatagacacgttaggaatcgcaattctaaaacgtatcgatacgcattttcaaaatacatgtcgtttgataaatacgatggtataataactaaatgtcataaagaaacaatattgctcaaactatccactgttctagacactacactatatgcagttttaagatgccataattcgaaaaagttaagaagatacctcaacgagttaaaaaaatataataacgataagtcctttaaaatatattctaatattatgaatgagagataccttaatgtatattataaagatatgtacgtgtcaaaggtatatgataaactatttcctgttttcacagataaaaattgtctactaacattactaccttcagaaattatatacgaaatattatacatgctgacaattaacgatctttataatatatcgtatccacctaccaaagtatagttgtatttttctcatgcgatgtgtgtaaaaaaactgatattatataaatattttagtgccgtataatgaagatgacgatgaaaatgatggtacatatatatttcgtatcattattgttattgctattccacagttacgccatagacatcgaaaatgaaatcacagaattcttcaataaaatgagagatactctaccagctaaagactctaaatggttgaatccagcatgtatgttcggaggcacaatgaatgatatagccgctctaggagagccattcagcgcaaagtgtcctcctattgaagacagtcttttatcgcacagatataaagactatgtggttaaatgggagaggctagaaaaaaatagacggcgacaggtttctaataaacgtgttaaacatggtgatttatggatagccaactatacatctaaattcagtaaccgtaggtatttgtgtaccgtaactacaaagaatggtgactgtgttcagggtatagttagatctcatattaaaaaacctccttcatgcattccaaaaacatatgaactaggtactcatgataagtatggcatagacttatactgtggaattctttacgcaaaacattataataatataacttggtataaagataataaggaaattaatatcgacgatattaagtattcacaaacgggaaagaaattaattattcataatccagagttagaagatagtggaagatacaactgttacgttcattacgacgacgttagaatcaagatgtaaaatacttacggttataccgtcgcaagaccacaggtttaaactaatactagatccaaaaatcaacgtaacgataggagaacctgccaatataacatgcactgctgtgtcaacgtcattattgattgacgatgtactgattgaatgggaaaatccatccggatggcttataggattcgattttgatgtatactctgttttaactagtagaggcggtatcaccgaggcgaccttgtactttgaaaatgttactgaagaatatataggtaatacatataaatgtcgtggacacaactattattttgaaaaaacccttacaactacagtagtattggagtaaatacacaatgcatttttatatacattactgaataattattattattatttatatcgtatttgtgctataacgcgactatctaggtatttgtatctcaccgatagagaacatataaatgtagactctattaaacagttgtgtaaaatatcagatcctaatagatgtggatgtacggctttagaaatgagttcattaaaatatgtgatatcaacggaacatatttatataattatactattgctgttagtataattattgattccacggaagaactaccaacagttactccaattacaacaacatataattatactatcgatgatagcactactgaagaactacaagtgactcctcatatggatctccatcgatgatacatgtattaaaatactttccgaataagtcttttaaatattgtattaattatgaaaaactatgctatgcgagtatgatacgatactagattttatctctagcgagagatgtcgttagaatcatttatcaacgaatatcgataacatgtgtcatttatacgttaaagtctgtccgtcttctctattgtttagactgtttgtagaatgctgtgatataaacaaactagtagacacaaatatttaactcatgatgaagttgagaatgatatgctttagctaatataaaaatatattaatccactatatattctagacttgatttaaaaccgataaactactactacgtactgtataagttaggagcagaccctaattatgtagatgatagaggtaatacttctgcatctatatgtccacttatgagaaaacgtcatttaataagatgcatcgtgaaaagaaatttattaaagagttggtaaaatatgaaaccgaaagtaaataatataggaaatacacctctacataactacgtatctcaatatgatatcactctcattcctcatccacaacccattaaaaaatggaaattaaagccctctattagcataaacggctacaggtctacctttacaatggcctttccttgtgcccagttcagaccctgtcattgccacgctactaaggactccctgaataccgtggccgacgtcagacattgtctgactgaatacatcctgtgggtttctcatagatggacccatagagaaagcgcagggtctctctacaggcttctcatctctttcagaactgatgcaacggagctctttggtggtgagttgaaggattcacttccgtggagatcattaaatgactccatgaaaaccgccgaagaacttcgtgcaatcattggactttgtactcaatcagctatcgtctctggaagagtcttcaacgataagtatatcgacatactacttatgctgcgaaagattctgaacgagaacgactatctcaccctcttggatcatatccgcactgctaaatactaaatctccttcatgctctctcactacactttttatcatcttatgaggaataattagcaccagaatagctatggattgcacatgtattctatgtcgtctactggatgaagatgtgacgtacaaaaaaataaaactagaaattgaaacgtgtcacaacttatcaaaacatatagatagacgaggaaacaatgcgctacattgttacgtctccaataaatgcgatacagacattaagattgttcgactgttactctctcgcggagtcgagagactttgtagaaacaacgaaggattaactccgctaggagcatacagtaagcatagatacgtaaaatctcagattgtgcatctactgatatccagctattcgaattcctctaacgaactcaagtcgaatataaatgatttcgacttacgtctgctaaaatacctaattgtggataaacggatacgtccgtccaagaatacgaattatgcaatcaatggtctcggattggtggatatatacgtaacgacgcctaatccgagaccagaagtattgctatggcttcttaaatcagaatgttacagcaccggttacgtatttcgtacctgtatgtacaacagtgatatgtgtaagaactctcttcattactatatatcgtctcatagagaatctctatccaaggatgtaattaaatgtttgatcgataacaatgtttccatccaatactactggtcttgctcaaccatagatatagagattattaataaaggatgtggacacgtgtagagtatacgacgtcagccctatattagaggcgtattatctaaacaagcgatttagagtaaccccatataatgtagacatggaaatcgttaatcttcttattgagagacgtcatactcttgtcgacgtaatgcgtagtattacttcgtacgattccagagaatataaccactacatcatcgataacattctaaagagatttagacaacaggatgaatccatcgtacaagccatactgataaactacttacattacggcgatatggtaagtatacctatcattcaatgcatgttggataagacgacggacaacaactttgttaataataatctcgtcgatgtaaacgtcgtaaggtttatcgtggaaaatatggacacgcggctgtaaatcacatatctaacaatggccgtctatgtatgtacggtctgatattatcgagatttaataattgcgggtatcactgttatgaagatgtatttgatatactaagcaagtacatggatgatatagatatgatcgataactctactatattacgcggtcgatgtcaataatatacaatttgcaaagcggttattggaatatggagcgagtgtcacgctcgataatcaatacggccatccagaaaagcagttaccaaagagaagctagttgatttattactgagttaccatcccactctagagactatgattgacgcatttaatagagatatacgctatctatatcctgaaccattattcgcctgtatcagatacgccttaatcctagatgatgattttccttctaaagtaagtatgatatcgccggtcgtcataaggaactaaagcgctatagagcagacattaatagaatgaagaatgcctacatatcaggcgtctccatgtttgatatattatttaaacgaagcaaacgccacagattgagatacgcaaagaacaatgagaggatcgactccattaaataatttatcatggagtgataatgtcctgtttccatggcatattacaaaatcgattccgtccaagatgataaaaacatttaccggcatcataaacacggagtttattttatatgtctcgcataaacattactaaaaaaatatattgttcggttttctttcacatctttaattatgaaaaagtaaatcattatgagatggacgcatcgttcgcgacagtatgtggtacatacctaacgtatttatggacgacggtaagaatgaaggtcacgtttctgtcaacaatgtcgacgcgatcgtgtaacacgactcacaatagaatctgtgaatgctctcccgatcatggatgcaaggcatgtgtttcccaaacaaaatgtggaataggatacggagtatccggagacgtcatctgttctccgtgtggtctcggaacatattctcacaccgtctcttccgcagataaatgcgaacccgtacccagaaatacctttaactatatcgatgtggaaattaacctgtatccagttaacgacacatcgtgtactcggacgaccactaccggtctcagcgaatccatctcaacgtcggaactaactattactatgaatcataaagactgcgatcccgtcttcttaataaggtagcgacttcaggtttctttacaggagaaaggtgtgcactctgaatttcgagattaaatgcaataacaaagattcttcctccaaacagttaacgaaagcaaagaatgatactatcatgccgcattcggagacagtaactctagcgtcgacatctatatactatatagtaataccaatactcaagactacgaaactgatacaatctcttatcatgtgggtaatgtagccatatgcccggtagttgcgatatacataaactgatcactaattccaaacccacccgctttttatagtaagtttttcacccataaatacaataattaatttctcgtaaaagtagaaaatatattctaatttattgcacggtaaggaagtagaatcataaagaacagtactcaatcaatagcaatcatgaaacaatatatcgtactggcatgcatgtgcctgccagtcttcagcaatcatcctcatcgtgtacggaagaagaaaacaaacatcatatgggaatcgatgttattatcaaagtcacaaagcaagaccaaacaccgaccgatgataagatttgccaatccgtaacggaaattacagagtccgagtcagatccagatcccgaggtggaatcagtcgaggatgtagatcctcctaccacttattactccatcatcggtggaggtctgagaatgaactttggattcaccaaatgtcctcagattaaatccatctcagaatccgctgatggaaagactgtgaggtgtctatcgacatcagatgtagcgaagaagagaaagacagcgacatcaagacccatccagtactcgggtctaacatctctcataagaaagtgagttacgaagatatcatcggttcaacgatcgtcgatacaaaatgtgtcaagaatctagagtttagcgttcgtatcggagacatgtgcaaggaatcatctgaacttgaggtcaagtatgtcgacggatcggcatctgaaggtgcaaccgatgatacttcactcatcgattcaacaaaactcaaagcgtgtgtctgaatcgataactctattcatctgaaattggatgagtagggttaatcgaacgattcaggcacaccacgaattaaaaaagtgtaccggacactatattccggtttgcaaaacaaaaagttacctctcgcgacttcttctttttctgtctcaatagtgtgatacgattatgacactattcctatttcctttcagggtatcacaaaaatattaaacctctttctgatggtctcatacaaaaatatttttattctctttctctctttgatggtctcataaaaaatatttttattctctttctctctttgatggtctcataaaatatttttattctctttctctctttgatggtctcataaaaaatatttttattctctttctctctttgatggtctcataaaatatttttattctctttctctctttgatggtctcataaaaaatatttttattctctttctctctttgatggtctcataaaa

SEQ ID NO: 2 - DNA, 60020 bp, synthetic construct
  source 1..60020: mol_type = other DNA
ggcctagcaggccggcctttttttctagacactaaataaatagtaagattaaattaattataaaattatgtatataatattaattataaaattatgtatatgatttactaactttagttagataaattaataatacataaattttagtatattaatattataaattaataatacataaattttagtatattaatattatattttaaatatttatttagtgtctagaaaaaaatgtgtgaccaacgaccgtaggaaactctagagggtaagaaaaatcaatcgctttatagagaccatcagaaagaggtttaatatttttgtgagaccatcgaaggagaaagagataaaacttttttacgactccatcagaaagaggtttaatatttttgtgagaccatcgaagagagaaagagataaaacttttttacgactccatcagaaagaggtttaatatttttgtgagaccatcgaagagagaaagagataaaacttttttacgactccatcagaaagaggtttaatatttttgtgagaccatcgaaggagaaagagataaaacttttttacgactccatcagaaagaggtttaatatttttgtgagaccatcgaaggagaaagagataaaacttttttacgactccatcagaaagaggtttaatatttttgtgagaccatcgaaggagaaagagataaaacttttttacgactccatcagaaagaggtttaatatttttgtgagaccatcgaagagagaaagagataaaacttttttacgactccatcagaaagaggtttaatatttttgtgagaccatcgaaggagaaagagataaaacttttttacgactccatcagaaagaggtttaatatttttgtgagaccatcgaagagagaaagagaataaaaatattttagtgacaccatcagaaagaggtttaatatttttgtgagaccatcgaagagagaaagagataaaacttttttacgactccatcagaaagaggtttaatatttttgtgagaccatcgaaggagaaagagataaaacttttttacgactccatcagaaagaggtttaatatttttgtgagaccatcgaagagagaaagagataaaacttttttacgactccatcagaaagaggtttaatatttttgtgagaccatcgaagagagaaagagataaaacttttttacgactccatcagaaagaccatcgaagagagaaagagaaagagatagttagtctagatatttttcttagtacaaaagtcaatgttttaaaatatatggacaagaatttgtctgtataaaaacttgtgtgaaattttgtaccaaagaaaaaatgtgagcagtatcccctacatggattttactagatcatttatataccaaaaaatattatacgatctacgttttattatatgattttaacgtgtaaattataaacattattttatgatatacaattgtctggtaacctagatgggcataggggatgagtatatgttgttggacgttattgtttaagaaatagttgatgcatcagaaagaggtttaatatttttgtgagaccatcgaagagagaaagagataaaacttttttacgactccatcagaaagaggtttaatatttttgtgagaccatcgaagagagaaagagataaaacttttttatgactccattgaagagagaatgagaataaaaatattttagtgacaccatcagaaagaggtttaatattttttatgagaccatcaaagagagaaagagaataaaaatattttatgactccattgaagagagaaagagaaaatgagaataaaaatattttagtgacaccatcagaaagaggtttaatattttttatgagaccatcaaagagagaaagagaataaaaatatttttgtaaaactttttttatgagaccatcaaagagagaaagagaataaaaatatttttgtaaaactttttttatgagaccatcaaagagagaaagagaataaaaatatttttgtaaaactttttttatgagaccatcaaagagagaaagagaataaaaatatttttgtaaaactttttttatgagaccatcaaagagagaaagagaataaaaatatttttgtaaaactttttttatgagaccatcaaagagagaaagagaataaaaatatttttgtaaaactttttttatgagaccatcaaagagagaaagagaataaaaatatttttgtaaaactttttttatgagaccatcaaagagagaaagagaataaaaatattttatgactccattgaagagagaaagagaataaaaatattttagtgacaccatcagaaagaggtttaatatttttgtgagaccatcgaagagagaaagagaataaaaatattttatgactccattgaagagagaaagagaataaaaatattttagtgacaccatcagaaagaggtttaatattttttatgagaccatcaaagagagaaagagaataaaaatatttttgtaaaactttttttatgagaccatcaaagagagaaagagaataaaaatatttttgtaaaactttttttatgagaccatcaaagagagaaagagaataaaaatatttttgtaaaactttttttatgagaccatcaaagagagaaagagaataaaaatatttttgtaaaactttttttatgagaccatcaaagagagaaagagaataaaaatatttttgtaaaactttttttatgagaccatcaaagagagaaagagaataaaaatattttatgactccattgaagagagaatgagaataaaaatattttagtgacaccatcagaaagaggtttaatatttttgtgagaccatcgaagagagaaagagaataaaaatattttatgactccattgaagagagaaagagaataaaaatattttagtgacaccatcagaaagaggtttaatattttttatgagaccatcaaagagagaaagagaataaaaatatttttgtaaaactttttttatgagaccatcaaagagagaaagagaataaaaatatttttgtaaaactttttttatgagaccatcaaagagagaaagagaataaaaatatttttgtaaaactttttttatgagaccatcaaagagagaaagagaataaaaatatttttgtaaaactttttttatgagaccatcaaagagagaaagagaataaaaatatttttgtaaaactttttttatgagaccatcaaagagagaaagagaataaaaatatttttgtaaaactttttttatgagaccatcaaagagagaaagagaataaaaatatttttgtaaaactttttttatgagaccatcaaagagagaaagagaataaaaatattttatgactccattgaagagagaatgagaataaaaatattttagtgacaccatcagaaagaggtttaatatttttgtgagaccatcgaagagagaaagagaataaaaatattttatgactccattgaagagagaatgagaataaaaatattttagtgacaccatcagaaagaggtttaatattttttatgagaccatcaaagagagaaagagaataaaaatatttttgtaaaactttttttatgagaccatcaaagagagaaagagaataaaaatatttttgtaaaaattataaacattattttatgatatacaattgtctggtaacctagatgggcataggggatgttgataagctcgacgagtatatgttgttggacgttattgtttaagaaatagttgatgcatcagaaagagaataaaaaatattttagtgagaccatcgaagagagaaagagataaaacttttttacgactccatcagaaagaggtttaatatttttgtgagaccatcgaagagagaaagagataaaacttttttacgactccatcagaaagaggtttaatatttttgtgagaccatcgaaggagaaagagataaaacttttttacgactccatcagaaagaggtttaatatttttgtgagaccatcaaagagagaaagagaataaaaatatttttgtaaaactttttttatgagaccatcaaagagagaaagagaataaaaatatttttgtaaaactttttttatgagaccatcaaagagagaaagagaataaaaatatttttgtaaaactttttttatgagaccatcaaagagagaaagagaataaaaatatttttgtaaaactttttttatgagaccatcaaagagagaaagagaataaaaatattttatgactccattgaagagagaatgagaataaaaatattttagtgacaccatcagaaagaggtttaatatttttgtgagaccatcgaagagagaaagagaataaaaatattttatgactccattgaagagagaatgagaataaaaatattttagtgacaccatcagaaagaggtttaatattttttatgagaccatcaaagagagaaagagaataaaaatatttttgtaaaactttttttatgagaccatcaaagagagaaagagaataaaaatatttttgtaaaactttttttatgagaccatcaaagagagaaagagaataaaaatatttttgtaaaactttttttatgagaccatcaaagagagaaagagaataaaaatatttttgtaaaactttttttatgagaccatcaaagagagaaagagaataaaaatattttatgactccattgaagagagaatgagaataaaaatattttagtgacaccatcagaaagaggtttaatatttttgtgagaccatcgaagagagaaagagaataaaaatattttatgactccattgaagagagaaagagaataaaaatattttagtgacaccatcagaaagaggtttaatattttttatgagaccatcaaagagagaaagagaataaaaatatttttgtaaaactttttttatgagaccatcaaagagagaaagagaataaaaatattttatgactccattgaagagagaatgagaataaaaatattttagtgacaccatcagaaagaggtttaatatttttgtgagaccatcgaagagagaaagagaataaaaatattttatgactccattgaagagagaatgagaataaaaatattttagtgacaccatcagaaagaggtttaatatttttgtgagaccatcgaagagagaaagagaataaaaatattttatgactccattgaagagagaatgagaataaaaatattttagtgacaccatcagaaagaggtttaatattttttatgagaccatcaaagagagaaagagaataaaaatatttttgtaaaactttttttatgagaccatcaaagagagaaagagaataaaaatatttttgtaaaactttttttatgagaccatcaaagagagaaagagaataaaaatatttttgtaaaactttttttatgagaccatcaaagagagaaagagaataaaaatatttttgtgagaccatcaaagagagaaagagaataaaaatatttttgtgagaccatcaaagagagaaagagaataaaaatatttttgtgagaccatcaaagagagaaagagaataaaaatattttatgactccattgaagagagaaagagaataaaaatattttagtgacaccatcagaaagaggtttaatatttttgtgagaccatcgaagagagaaagagaataaaaatattttatgactccattgaagagagaaagagaataaaaatattttagtgacaccatcagaaagaggtttaatattttttatgagaccatcaaagagagaaagagaataaaaatattttttatgagaccatcaaagagagaaagagaataaaaatattttatgagaccatcaaagagagaaagagaataaaaatattttttatgagaccatcaaagagagaaagagaataaaaatattttatgagaccatcaaagagagaaagagaataaaaatattttttatgagaccatcaaagagagaaagagaataaaaatatttttgtatgagaccatcagaaagaggtttaatatttttgtgataccctgaaaggaaataggaatagtgtcataatcgtatcacactattgagacagaaaaagaagaagtcgcgagaggtaactttttgttttgcaaaccggaatatagtgtccggtacacttttttaattcgtggtgtgcctgaatcgttcgattaaccctactcatccaatttcagatgaatagagttatcgattcagacacacgctttgagttttgttgaatcgatgagtgaagtatcatcggttgcaccttcagatgccgatccgtcgacatacttgacctcaagttcagatgattccttgcacatgtctccgatacgaacgctaaactctagattcttgacacattttgtatcgacgatcgttgaaccgatgatatcttcgtaactcactttcttatgagagatgttagacccgagtactggatgggtcttgatgtcgctgtctttctcttcttcgctacatctgatgtcgatagacacctcacagtctttccatcagcggattctgagatggatttaatctgaggacatttggtgaatccaaagttcattctcagacctccaccgatgatggagtaataagtggtaggaggatctacatcctcgactgattccacctcgggatctggatctgactcggactctgtaatttccgttacggattggcaaatcttatcatcggtcggtgtttggtcttgctttgtgactttgataataacatcgattcccatatgatgtttgttttcttcttccgtacacgatgaggatgattgctgaagactggcaggcacatgcatgccagtacgatatattgtttcatgattgctattgattgagtactgttctttatgattctacttccttaccgtgcaataaattagaatatattttctacttttacgagaaattaattattgtatttatgggtgaaaaacttactataaaaagcgggtgggtttggaattagtgatcagtttatgtatatcgcaactaccgggcatatggctacattacccacatgataagagattgtatcagtttcgtagtcttgagtattggtattactatatagtatatagatgtcgacgctagagttactgtctccgaatgcggcatgatagtatcattctttgctttcgttaactgtttggaggaagaatctttgttattgcatttaatctcgaaattcagagtgcacacctttctcctgtaaagaaacctgaagtcgctaccttattaagaagacgggatcgcagtctttatgattcatagtaatagttagttccgacgttgagatggattcgctgagaccggtagtggtcgtccgagtacacgatgtgtcgttaactggatacaggttaatttccacatcgatatagttaaaggtatttctgggtacgggttcgcatttatctgcggaagagacggtgtgagaatatgttccgagaccacacggagaacagatgacgtctccggatactccgtatcctattccacattttgtttgggaaacacatgccttgcatccatgatcgggagagcattcacagattctattgtgagtcgtgttacacgatcgcgtcgacattgttgacagaaacgtgaccttcattcttaccgtcgtccataaatacgttaggtatgtaccacatactgtcgcgaacgatgcgtccatctcataatgatttactttttcataattaaagatgtgaaagaaaaccgaacaatatatttttttagtaatgtttatgcgagacatataaaataaactccgtgtttatgatgccggtaaatgtttttatcatcttggacggaatcgattttgtaatatgccatggaaacaggacattatcactccatgataaattatttaatggagtcgatcctctcattgttctttgcgtatctcaatctgtggcgtttgcttcgtttaaataatatatcaaacatggagacgcctgatatgtaggcattcttcattctattaatgtctgctctatagcgctttagttccttatgacgaccggcgatatcatacttactttagaaggaaaatcatcatctaggattaaggcgtatctgatacaggcgaataatggttcaggatatagatagcgtatatctctattaaatgcgtcaatcatagtctctagagtgggatggtaactcagtaataaatcaactagcttctctttggtaactgcttttctggatggccgtattgattatcgagcgtgacactcgctccatattccaataaccgctttgcaaattgtatattattgacatcgaccgcgtaatatagtagagttatcgatcatatctatatcatccatgtacttgcttagtatatcaaatacatcttcataacagtgatacccgcaattattaaatctcgataatatcagaccgtacatacatagacggccattgttagatatgtgatttacagccgcgtgtccatattttccacgataaaccttacgacgtttacatcgacgagattattattaacaaagttgttgtccgtcgtcttatccaacatgcattgaatgataggtatacttaccatatcgccgtaatgtaagtagtttatcagtatggcttgtacgatggattcatcctgttgtctaaatctctttagaatgttatcgatgatgtagtggttatattctctggaatcgtacgaagtaatactacgcattacgtcgacaagagtatgacgtctctcaataagaagattaacgatttccatgtctacattatatggggttactctaaatcgcttgtttagataatacgcctctaatatagggctgacgtcgtatactctacacgtgtccacatcctttattaataatctctatatctatggttgagcaagaccagtagtattggatggaaacattgttatcgatcaaacatttaattacatccttggatagagattctctatgagacgatatatagtaatgaagagagttcttacacatatcactgttgtacatacaggtacgaaatacgtaaccggtgctgtaacattctgatttaagaagccatagcaatacttctggtctcggattaggcgtcgttacgtatatatccaccaatccgagaccattgattgcataattcgtattcttggacggacgtatccgtttatccacaattaggtattttagcagacgtaagtcgaaatcatttatattcgacttgagttcgttagaggaattcgaatagctggatatcagtagatgcacaatctgagattttacgtatctatgcttactgtatgctcctagcggagttaatccttcgttgtttctacaaagtctctcgactccgcgagagagtaacagtcgaacaatcttaatgtctgtatcgcatttattggagacgtaacaatgtagcgcattgtttcctcgtctatctatatgttttgataagttgtgacacgtttcaatttctagttttatttttttgtacgtcacatcttcatccagtagacgacatagaatacatgtgcaatccatagctattctggtgctaattattcctcataagatgataaaaagtgtagtgagagagcatgaaggagatttagtatttagcagtgcggatatgatccaagagggtgagatagtcgttctcgttcagaatctttcgcagcataagtagtatgtcgatatacttatcgttgaagactcttccagagacgatagctgattgagtacaaagtccaatgattgcacgaagttcttcggcggttttcatggagtcatttctgatgaaacatttaatgatctaaatttcagtttatgtttgtaccccgtattcatacttaacaaattggtattacataccattaataatgcaagcataaaaaatcgttagtagatgtttctaaatataggttccgtaagcaaagaatataagaatgaagcggtaatgataaaatcaatcgttatctaaaatgatcatactcatttattttattctattatattaacacatacatttttaacagcaacacattcaatattgtattgttatttttatattatttacacaattaacaatatattattagtttatattactgaattaataatataaaattcccaatcttgtcataaacacacactgagaaacagcataaacacaaaatccatcaaaaatgttgataaattatctgatgttgttgttcgctgctatgataatcagatcattcgccgatagtggtaacgctatcgaaacgacatcgccagaaattacaaacgctacaacagatattccagctatcagattatgcggtccagagggagatggatattgtttacacggtgactgtatccacgctagagatatcgacggtatgtattgtagatgctctcatggttatacaggcattagatgtcagcatgtagtattagtagactatcaacgttcagaaaaaccaaacactacaacgtcatatatcccatctcccggtattatgcttgtattagtaggcattattattattacgtgttgtctattatctgtttataggttcactcgacgaactaaactacctatacaagatatggttgtgccataatttttataaattttttttatgagtatttttacaaaaatgtataaagtgtatgtcttatgtatatttataaaaatgctaaatatgcgatgtatctatgttatttgtatttatctaaacaatacctctacctctagatattatacaaaaattttttatttcggcatattaaagtaaaatctagttaccttgaaaatgaatacagtgggtggttccgtatcaccagtaagaacataatagtcgaatacagtatccgattgagattttgcatacaatactagtctagaaagaaatttgtaatcatcttctgtgacgggagtccatatatctgtatcatcgtcccatgctatattcctgttatcatcattagttaatgaaaataactctcgtgcttcagaaaagtcaaatattgtatccatacatacatctccaaaactatcgcttatacgtttatctttaacgatacctatacctagatggttatttactaacagacattttccagatctattgactataactcctatagtttccacatcaaccaagtaatgatcatctattgttatataacaataacataactcttttccgtttttatcagtatgtatatctatatcaacgtcgtcgttgtagtgaatagtagtcattgatctattatatgaaacggatatgtctagaacggcaattgttttacgtccagttaacactttcgttgatttaaagtctagagtctttgcaaacataatatccttatccgactttatatttcctgtagggtggtataattttattttgcctccacatatcggtgtttccaaatatattactagacaatattccatatagttattagttaagggtacccaattagaacacgtacgcttattatcatcatttggatcgtatttcataaaagttattgtactatcgatgtcaacacattctacattttttaatcgtctatatagtatttttctgatattttctataatatcagaattgtcttccatcggaagttgtatactatcggaatcagttacatgtttaaataattctctgatgtcattccttatacaatcaaattcattattaaacagtttaatagtctgtagacctttatcgtcgtaaatatccattgtcttattagttacgcttatttttatgtgtttttacgttgctttattatattttataagaatgattgtttgacgaatcacgagaactattaagacacattattaggtatatattataaaaaagtttttgattacgatgttataagaggaaagaggacacattaacatcatacatcaattaactacattcttataacatcgtaatcaaaagaattgcaattttgatgtataacaactgtcaatgggttatggaattgtatattacatattatacggtatgttggtaacgacaaataccgatcggtaattgtctgccggtgtaatagaattatatatatctatctattacaccggccttgtatacataataataagttgtggtagtatgatctccatatttataatttaggactttgtattcagtttttttggaatcataaaaaataaaaaaaagttttactaatttaaaattatttacatttttttcactgtttagtcgcggatatggaattcgatcctgccaaaatcaatacatcatctatagatcatgtaacaatattacaatacatagatgaaccaaatgatataagactaacagtatgcattatcacaaaaataaatccacatttggctaatcaatttcgggcttggaaaaaacgtatcgccggaagggactatatgactaacttatctagagatacaggaatacaacaatcaaaacttactgaaactgtcaaaaaaatagaaacatatatggtctatatatacactacaatttagttattaattggataaccgatgtgattatcaatcaatattaagaaggttggtaaattggtacatagctaataatacctatacacccaataatacaacaaccatttctgagttggatatcatcaaaatactggataaatacgaggacgtgtatagagtaagtaaagaaaaagaatgtgaaatttgctatgaagttgtttactcaaaacgatagatactttggtttattggattcgtgtaatcatatattttgcataacatgcatcaatatatggcatagaacacgaagagaaaccggtgcgtcggataattgtcctatatgtcgtacccgttttagaaacataacaatgagcaagttaactaataaataaaaagtttaatttgttgacgacgtatgtcgttattttttctcgtataaaagattaatttgattctaatataatctttagtattggataaatatcaattcaaattaattccattagattatatcataaataaaaatagtagcacgcactacttcagccaaatattcttttttgaaacgccatctatcgtagtgaggacacaagtgaacctataatgagcaaatttattagtatcggttacatgaaggactttacgtagagtggtgattccactatctgtggtacgaacggtttcatcttctttgatgccatcacccagatgttctataaacttggtatcctttgccaaccaatacatatagctaaactcaggcatatgttccacacatcctgaacaatgaaattctccagaagatgttacaatgtctagatttggacatttggtttcaaccgcgttaacatatgagtgaacacacccatacatgaaagcgatgagaaataggattttcatcttgccaaaatatcactagaaaaaatttatttatcaattttaaaggtataaaaaatacttattgttgctcgaatattttgtatttgatggtatacggaagattagaaatgtaggtattatcatcaactgattctatggttttatgtattctatcatgtttcactattgcgttggaaataatatcatatgcttccacatatattttattttgttttaactcataatactcacgtaattctggattattgacatatctatgaataattttagctccatgatcagtaaatattaatgagaacatagtattaccacctaccattatttttttcatctcattcaattcttaattgcaaagatctatataatcattatagcgttgacttatggactctggaatcttagacgatgtacagtcatctataatcatggcatatttaatacattgttttatagcatagtcgttatctacgatgttagatatttctctcaatgaatcaatcacacaatctaatgtaggtttatgacataatagcattttcagcagttcaatgtttttagattcgttgatggcaatggctatacatgtatatccgttatttgatctaatgttgacatctgaaccggattctagcagtaaagatactagagattgtttattatatctaacagccttgtgaagaagtgtttctcctcgtttgtcaatcatgttaatgtctttaagataaggtaggcaaatgtttatagtactaagaattgggcaagcataagacatgtcacaaagaccctttttgtatgtataagtgtaaaaattataacattcatagttggatttacataggtgtccaatcgggatctctccatcatcgagataattgatggcatctcccttccttttttagtagatatttcatcgtgtaagaatcaatattaatatttctaaagtatccgtgtatagcctctttatttaccacagttccatattccactagagggatatcgccgaatgtcatatactcaattagtatatgttggaggacatccgagttcattgttttcaatatcaaaaagatggtttccttatcatttctccatagtggtacaatactacacattattccgtgcggctttccattttccaaaaacaatttgaccaaatctacatctttattgtatctataatcactatttagataatcagccataattactcgagtgcaacatgttagatcgtctatatatgaataagccgtgttatctattcctttcattaacaatttaacgatgtctatatctatatgagatgacttaatataatattgaagagctgtacaatagtttttatctataaaagacggcttgattccgtgattaattagacatttaacaacttccggacgcacatatgctctcgtatccgactctgaatacagatgagagatgatatacagatgcaatacggtaccgcaatttcgtagttgataatcatcatacgcgtatcagtactcgtcctcataaagaacactgcagccattttctatgaacaaatcaataatttcaggaacaggatcatctgtcattacataattttctataactgaacgatggttttcacatttaacactcaagtcaaatccatgttctaccaacacctttatcaagtcaacgtctacatttttggatttcatatagctgaatatattaaagtcatttatgttgctaaatccagtggcttctagtagagccatcgctatatcctttaactttaacatgtctactatttgtgtattcttctaatggggtagctgtctccaatttttgcgtaatggattagtgccactgtctagtagtagtttgacgacctcgacattattacaatgctcattaaaaaggtatgcgtgtaaagcattattcttgaattggttcctggtatcattaggatctctgtctctcaacatctgtttaagttcatcgagagccacctcctcattttccaaatagtcaaacattttgactgaatgagctactgtgaactctatacacccacacaactaatgtcattaaatatcatgtcaaaaacttgtacaattattaataaaaataatttagtgtttaaattttaccagttccagattttacacctccgttaaccccactttttacaccactggacgatcctcctccccacattccaccgccaccagatgtataagttttagatcctttattactaccatcatgtccatggataaagacactccacatgccgccactaccccctttagaagacatattaataagacttaaggacaagtttaacaataaaattaatcacgagtaccctactaccaacctacactattatatgattatagtttctatttttacagtaccttaactaaagtctctagtcacaagagcaatactaccaacctacactattatatgattatagtttctatttttataggaacgcgtacgagaaaatcaaatgtctaatttctaacggtagtgttgataaacgattatcgtcaatggatacctcctctatcatgtcgtctattttcttactttgttctattaacttattagcattatatattatttgattataaaacttatattgcttattagcccaatctgtaaatatcggattattaacatatcgtttctttgtaggtttatttaacatgtacatcactgtaagcatgtccgtaccatttattttaatttgacgcatatccgcaatttctttttcgcagtcggttataaattctatatatgatggatacatgctacatgtgtacttataatcgactaatatgaagtacttgatacatattttcagtaacgatttattattaccacctatgaataagtacctgtgatcgtctaggtaatcaactgttttcttaatacattcgatggttggtaatttactcagaataatttccaatatcttaatatataattctgctatttctgggatatatttatctgccagtataacacaaatagtaatacatgtaaacccatattttgttattatattaatgtctgcgccattatctattaaccattctactaggctgacactatgcgacttaatacaatgataaagtatactacatccatgtttatatcatcaatatacggcttacaaagttttagtatcgataacacatccaactcacgcatagagaaggtagggaataatggcataatatttattaggttatcatcattgtcattatctacaactaagtttccattttttaaaatatactcgacaactttaggatctctattgccaaatttttgaaaatatttatttatatgcttaaatctatataatgtagctccttcatcaatcatacatttaataacattgatgtatactgtatgataagatacatattctaacaatagatcttgtatagaatctgtatatcttttaagaattgtggatattattacgtaaactattacacaattctaaaatataaaacgtatcacggtcgaataatagttgatcaactatataattatcgattttgtgatttttcttcctaaactgtttacgtaaatagttagatagaatattcattagttcatgaccactatagttactatcgaataacgcgtcaaatatttcccgtttaatatcgcatttgtcaagataataatagagtgtggtatgttcacgataagtataataacgcatctctttttcgtgtgaaattaaatagtttattacgtccaaagatgtagcataaccatcttgtgacctagtaataatataataatagagaactgttttacccattctatcatcataatcagtggtgtagtcgtaatcgtaattgtctaattcatcatcccaattataatattcaccagcacgtctaatctgttctattttgatcttgtatccatactgtatgttgctacatgtaggtattcctttatccaataatagtttaaacacatctacattgggatttgatgttgtagcgtatttttctacaatattaataccatttttgatactatttatttctatacctttcgaaattagtaatttcaataagtctatatcgatgttatcagaacatagatattcgagtatatcaaaatcattgatatttttatagtcgactgacgacaataacaaaatcacaacatcgtttttgatattattatttttcttggtaacgtatgcctttaatggagtttcaccatcatactcatataatggatttgcaccactttctatcaatgattgtgcactgctggcatcgatgttaaatgttttacaactatcatagagtatcttatcgttaaccatgattggttgttgatgctatcgcattttttggtttctttcatttcagttatgtatggatttagcacgtttgggaagcatgagctcatatgatttcagtactgtagtgtcagtactattagtttcaataagatcaatctctagatctatagaatcaaaacacgataggtcagaagataatgaatatctgtaggcttcttgttgtactgtaacttctcgttttgttagatgtttgcatcgtgctttaacatcaatggtacaaattttatcctcgctttgtgtatcatattcgtccctactataaaattgtatattcagattatcatgagatgtgtatacgctaacggtatcaataaacggagcacaccatttagtcataaccgtaatccaaaaatttttaaagtatatcttaacgaaagaagttgtgtcattgtctacggtgtatggtactagatcctcataagtgtatatatctagagtaatgtttaatttatcaaatggttgataatatggatcctcatgacaatttccgaagatggaaatgagatatagacatgcaataaatctaattgcggacatggttactccttaaaaaaatacgaataatcaccttggctatttagtaagtgtcatttaacactatactcatattaatccatggactcataatctctatacgggattaacggatgttctatatacggggatgagtagttttcttctttaactttatactttttactaatcatatttagactgatgtatgggtaatagtgtttaaagagttcgttctcatcatcagaataaatcaatatctctgtttttttgttatacagatgtattacagcctcatatattacgtaatagaacgtgtcatctaccttattaactttcaccgcatagttgtttgcaaatacggttaatcctttgacctcgtcgatttccgaccaatctgggcgtataatgaatctaaactttaatttcttgtaatcattcgaaataatttttagtttgcatccgtagttatcccctttatgtaactgtaaatttctcaacgcgatatctccattaataatgatgtcgaattcgtgctgtatacccatactgaatggatgaacgaataccgacggcgttaatagtaatttactttttcatctttacatattgggtactagttttactatcataagtttataaattccacaagctactatggaataagccaaccatcttagtataacacacatgtcttaaagtttattaattaattacatgttgttttatatatcgctacgaatttaaacagagaaatcagtttaggaaaaaaaaatatctatctacatcatcacgtctctgtattctacgatagagtgctactttaagatgagacatatccgtgtcatcaaaaatatactccattaaaatgattattccggcagcgaacttgatattggatatatcacaacctttgttaatatctacgacaatagacagcagtcccatggttccataaacagtgagtttatctttctttgaagagatattttgtagagatcttataaaactgtcgaatgacatcgcatttatatctttagctaaatcgtatatgttaccatcgtaatatctaaccgcgtctatcttaaacgtttccatcgctttaaagacgtttccgatagatggtctcatttcatcagtcatactgagccaacaaatataatcgtgtataacatctttgatagaatcagactctaaagaaaacgaatcggctttattatacgcattcatgataaacttaatgaaaaatgtttttcgttgtttaagttggatgaatagtatgtcttaataattgttattatttcattaattaatatttagtaacgagtacactctataaaaacgagaatgacataactagttatcaaagtgtctaggacgcgtaattttcatatggtatagatcctgtaagcattgtctgtattctggagctattttctctatatctaatttctgaacgttcaccaatgtctctagccactttggcactaatagcgatcattcgcttagcgtcttctatattattaactggttgattcaatctatctagcaatggaccgtcggacagcgtcattctcatgttcttaatcaatgtacatacatcgccgtcatctaccaattcatccaacaacataagctttttaaaatcatcattataataggtttgatcgttgtcatttctccaaagaatatatctaataagtagagtcctcatgattagttaacaactattttttatgttaaatcaattagtacaccgctatgtttaatacttattcatattttagtttttaggattgagaatcaatacaaaaattaatgcatcattaattttagaaatacttagtttccacgtagtcaatgaaacatttgaactcatcgtacaggacgttctcgtacaggacgtaactataaaccggtttatatttgttcaagatagatacaaatccgataactttttttacgaattctacgggatccactttaaaagtgtcataccgggttctttttatttttttaaacagattaatggtgtgatgttgattaggtcttttacgaatttgatatagaatagcgtttacatattctccataatggtcaatcgccatttgttcgtatgtcataaattctttaattatatgacactgtgtattatttagttcatccttgttcatcattaggaatctatccaatatggcaattatactagaactataggtgcgttgtatacacatattgatgtgtctgtttatacaatccatgctactaccttcgggtaaaattgtagcatcatataccatttctagtactttaggttcattgttatccattgcagaggacgtcatgacgcatcctaaaaaaatatattatttttatgttattttgttaaaaataatcatcgaatacgaatcatccagtccactgaatagcaaaatctttactattttggtatcttccaatgtggctgcctgatgtaatggaaattcattctctagaagatttttcaatgctccagcgttcaacaacgtacatactagacgcacgttattatcagctattgcataatacaaggcactatgtccatggacatccgccttaaatgcatctttgctagagagaaagcttttcagctgcttagacttccaagtattaattcgtgacagatccatgtctgaaacgagacgctaattagtgtataatttttgtcatattgcaccagaattaataatatctctaatagatctgattagtagatacatggctatcgcaaaacaacatatacacatttaataaaaataatatttattaagaaaattcagatttcacgtacccatcaatataaataaaataatgattccttacaccgtacccatattaaggagattctaccttacccataaacaatataaatccagtaatatcatgtctgatgatgaacacaaatggtgtattaaattccagtttttcaggagatgatctcgccgtagctaccataatagtagatgcctctgctacagttccttgttcgtcgacatctatctttgcattctgaaacattttataaatatataatgggtccctagtcatatgtttaaacgacgcattatctggattaaacatactaggagccatcatttcggctatcgacttaatatccctcttattttcgatagaaaatttagggagtttaagattgtacactttattccctaattgaaacgaccaatagtctaattttgcagccgtaatagaatctgtgaaatgggtcatattatcacctattgccaggtacatactaatattagcatccttatacggaaggcgtaccatgtcatattctttgtcatcgattgtgattgtatttccttgcaatttagtaactacgttcatcatgggaaccgttttcgtaccgtacttattagtaaaactagcattgcgtgttttagtgatatcaaacggatattgccatatacctttaaaatatatagtattaatgattgcccatagagtattattgtcgagcatattagaatctactacattagacataccggatctacgttctactatagaattaattttattaaccgcatctcgtctaaagtttaatctatataggccgaatctatgatattgttgataatacgacggtttaatacacacagtattatctacgaaactttgataagttagatcagtgtacgtatatttagatgttttcagcttagctaatcctgatattaattctgtaaatgctggacccagatctctttttctcaaatccatagtcttcaataattctattctagtattacctgatgcaggcaatagcgacataaacatagaaaacgaataaccaaacggtgagaagacaatattatcatcttgaatatttttatacgctactataccggcattggtaaatccttgtagacgataggtagacgctgaacacgttaacgatagtatcaataacgcaatcatgattttatggtattaataattaaccttatttttatgttcggtataaaaattattgatgtctacacatccttttgtaattgacatctatatatccttttgtataatcaactctaatcactttaacttttacagttttccctaccagtttatccctatattcaacatatctatccatatgcatcttaacactctctgccaagatagcttcagagtgaggatagtcaaaaagataaatatatagagcataatcattctcgtatactctgccctttattacatcgcccgcattgggcaacgaataacaaaatgcaagcatcttgttaacgggctcgtaaattgggataaaaattatgtttttatatctattttattcaagagaatattcaggaatttctttttccggttgtatctcatcgcagtatatatcatttgtacattgtttcatattttttaatagtttacaccttttagtaggactagtatcgtacaattcatagctgtattttgaattccaatcacgcataaaaatatcttctaattgttgacgaagacctaatccatcatccggtgtaatattaatagatgctccacatgtatccgtaaagtaatttcctgtccaatttgaggtacctatataggccgttttatcggttaccatatatttggcatggtttaccctagaatacggaatgggaggatcagcatctggtacaataaatagctttacttctatatttatgtttttagattttagcatagcgatagatcttaaaaagtttctcatgataaacgaagatcgttgccagcaactaatcaatagcttaacggatacttgtctgtctatagcggatcttcttaattcatcttctatataaggccaaaacaaaattttacccgccttcgaataaataatagggataaagttcataacagatacataaacgaatttactcgcatttctaatacatgacaataaagcggttaaatcattggttctttccatagtacatagttgttgcggtgcagaagcaataaatacagagtgtggaacaccacttacgttaatactaagaggatgatctgtattataatacgacggataaaagtttttccaattatatggtagattgttaactccaagataccagtatacctcaaaaatttgagtgagatccgctgccaagttcctattattgaagatcgcaatacccaattctttgacctgagttagtgatctccaatccatgttagcgcttcctaaataaatatgtgtattatcagatatccaaaattttgtatgaagaactcctcctaggatatttgtaatatctatgtatcgtacttcaactccggccatttgtagtctttcaacatcctttaatggtttgttagatttattgacggctactctaactcgtactcctcttttgggtaattgtacaatctcgtttaatattatcgtgccgaaattcgtacccacttcatccgataaactccaataaaaagatgatatatctagtgtttttgtggtattggatagaatttccctccacatgttaaatgtagacaaatatactttatcaaattgcatacctataggaatagtctctgtaatcactgcgattgtattatccggattcattttatttgttaaaagaataatcctatatcacttcactctattaaaaatccaagtttctatttctttcatgactgattttttaacttcatccgtttccttatgaagatgatgtttggcaccttcataaatttttatttctctattacaatttgcatgttgcatgaaataatatgcacctaaaacatcgctaatctcattgtttgttccctggagtatgagagtcggggtgttaatcttggaaattatttttctaaccttgttggtagccttcaagacctgactagcaaatccagccttaattttttcatgattgattaatgggtcgtattggtatttataaactttatccatatctctagatactgattctggacatagctttccgactggcgcatttggtgtgatggttcccataagtttggcagctagcagattcagtcttgaaacagcatctgcattaactagaggagacattagaatcattgctgtaaacaagtttggattatcgtaagaggctagtatagaaattgttgctcccatggaatgacccaataagtagatttaatagttaccacgtgctgtaccaaagtcatcaatcatcattttttcaccattacttcttccatgtccaatatgatcatgtgagaatactaaaattcctaacgatgatatgttttcagctagttcgtcataacgtccagaatgtttaccagctccatgacttatgaatactaatgccttaggatatgtaatcattgtccagattgaacatacagtttgcactcatgattcacgttatataactatcaatattaacagttcgtttgatgatcatattatttttatgttttattgataattgtaaaaacatacaattaaatcaatatagaggaaggagacggctactgtcttttgtgagatagtcatggcgactaaattagattatgaggatgctgttttttactttgtggatgatgataaaatatgtagtcgcgactccatcatcgatctaatagatgaatatattacgtggagaaatcatgttatagtgtttaacaaagatattaccagttgtggaagactgtacaaggaattgatgaagttcgatgatgtcgctatacggtactatggtattgataaaattaatgagattgtcgaagctatgagcgaaggagaccactacatcaattttacaaaagtccatgatcaggaaagtttattcgctaccataggaatatgtgctaaaatcactgaacattggggatacaaaaagatttcagaatctagattccaatcattgggaaacattacagatctgatgaccgacgataatataaacatcttgatactttttctagaaaaaaaattgaattgatgatataggggtcttcataacgcataattattacgttagcattctatatccgtgttaaaaaaaattatcctatcatgtatttgagagttttatatgtagcaaacatgatagctgtgatgccaataagctttagatattcacgcgtgctagtgttagggatggtattatctggtggtgaaatgtccgttatataatctacaaaacaatcatcgcatatagtatgcgatagtagagtaaacatttttatagtttttactggattcatacatcgtctacccaattcggttatgaatgaaattgtcgccaatcttacacccaaccccttgttatccattagtatagtattaacttcgttatttatgtcataaactgtaaatgattttgtagatgccatatcatacatgatattcatgtccctattataatcattactaactttatcacaatatatgttgataatatctatatatgatctagtctttgtgggcaactgtctatacaagtcgtctaaacgttgtttactcatatagtatcgaacagccatcattacatggtcccgttccgttgatagataatcgagtatgttagtggacttgtcaaatctatataccatattttctggaagtggatatacatagtcgtgatcaacattattgctagcctcatcttctatatcctgtactataccatctacataatctacgatattattacacataaacatcgacaacatactattgtttattatctaagtcctgttgatccaaacccttgatctcctctatttgtactatctagagattgtacttcttccagttctggataatatatacgttgatagattagctgagctattctatctccagtatttacattaaacgtacattttccattattaataagaatgactcctatgtttcccctataatcttcgtctattacaccacctcctatatcaatgccttttagtgacagaccagacctaggagctattctaccatagcaaatcttaggcatggacatactaatatctgtcttaattaactgtctttctcctggagggatagtataatcgtaagcgctatacaaatcatatccggcagcacccggcgattgcctagtaggagatttagctctgttagtttccttaacaaatctaactggtgagttaatattcatgttgaacataaaactaatattttatttcaaaattatttaccatcccatatattccatgaataagtgtgatgattgtacacttctatagtatctatatacgattcacgataaaatcctcctatcaatagcagtttattatccactatgatcaattctggattatccctcggataaataggatcatctatcagagtccatgtattgctggattcacaataaaattccgcatttctaccaaccaagaataaccttctaccgaacactaacgcgcatgatttataatgaggataataagtggatggtccaaactgccactgatcatgattgggtagcaaatattctgtagttgtatcagtttcagaatgtcctcccattacgtatataacattgtttatggatgccactgctggattacatctaggtttcagaagactcggcatattaacccaagcagcatccccgtggaaccaacgctcaacagatgtgggatttggtagacctcctactacgtataatttattgttagcgggtatcccgctagcatacagtctggggctattcatcggaggaattggaatccaattgtttgatatataatttacagctatagcattgttatgtatttcattgttcatccatccaccgatgagatatactacttctccaacatgagtacttgtacacatatggaatatatctataatttgatccatgttcataggatactctatgaatggatacttgtatgatttgcgtggttgtttatcacaatgaaatattttggtacagtctagtatccattttacattatttatacctctgggagaaagataatttgacctgattacatttttgataaggagtagcagatttcctaatttatttcttcgctttatataccacttaatgacaaaatcctcatctggaacatttagttcatcgctttctagaataagtttcatagatagataatcaaaattgtctatgatgtcatcttccagttccaaaaagtgtttggcaataaagtttttagtatgacataagagattggatagtccgtattctatacccatcatgtaacactcgacacaatattcctttctaaaatctcgtaggataaagtttatacaagtgtagatgataaattctacagaggttaatatagaagcacgtaataaattgacgacgttatgactatctatatatacctttccagtatatgagtaaataactatagaagttagactgtgaatgtcaaggtctagacaaaccctcgtaactggatctttatttttcgtgtatttttgacgtaaatgtgtgcgaaagtaaggagataactttttcaatatcgtagaattgactattatattgcctcctatggcatcaataattgttttgaatttcttagtcatagacaatgctaatatattcttacagtacacagtattgacaaatatcggcatttatgtttctttaaaagtcaacatctaaagaaaaatgattatcttcttgagacataactcccattttttggtattcacccacacgtttttcgaaaaaattagttttaccttctaatgatatattttccatgaaatcaaacggattggtaacattataaatttttttaaatcccaattcagaaatcaatctatccgcgacgaattctatatatgttttcatcatttcacaattcattcctataagtttaactggaagagccgcagtaagaaattcttgttcaatggataccgcatctgttataatagatctaacggtttcttcactcggtggatgcaataaatgtttaaacatcaaacatgcgaagtcgcagtgtagaccctcgtctctactaatcaattcgttggaaaacgtgagtccgggcattaggccacgctttttaagccaaaatatggaagcgaatgatccggaaaagaagattccttctactgcagcaaaggcaataagtctctctccataaccggcgctgtcatgtatccacttttgagcccaatcggccttcttttttacacaaggcatcgtttctatggcattaaagagatagtttttttcattactatctttaacataagtatcgatcaaaagactatacatttccgaatgaatgttttcaatggccatctgaaatccgtagaaacatctagcctcggtaatctgtacttctgtacaaaatcgttccgccaaattttcattcactattccgtcactggctgcaaaaaacgccaatacatgttttataaaatatttttcgtctggtgttagtttattccaatcattgatatctttagatatatctacttcttccactgtccaaaatgatgcctctgcctttttatacatgttccagatgtcatgatattggattgggaaaataacaaatctatttggatttggtgcaaggatgggttccataactaaattaacaataacaataaattttttttcagttatctatatgcctgtacttggatcttttgtacatcgatatcgccgcaatcactacaataattacaagtattattgatagcattgttattagtactatcataattaaattatcgttattatcattttgtaattgtgacatcatactagataaatcgtttgcgagattgttgtgggaagcgggcatggaggatgaattatcgttattattatttaaagcctcccattcggattcacaaatatggcgcgcgttcaacattttatggaaacagataacaagaaaactcgtcatcgttcaaatttttaacgatagtaaaccgattaaacgtcgagctaatttctaacgctagcgactctgttggatatgggtttccagatatatatcttttcagttcccctacgtatctataatcatctgtaggaaatggaagatatttccatttatctactgttcctaatatcatatgtggtggtgtagtagaaccattaagcgcgaaagatgttatttcgcatcgtattttaacttcgcaataatttctggttagataacgcactctaccagtcaagtcaatgatattagcctttacagatatattcatagtagtcgtaacgatgactccatcttttagatgcgatactcctttgtatgtaccagaatcttcgtacctcaaactcgatatatttaaacaagttaatgagatattaacgcgttttatgaatgatgatatataaccagaagttttatcctcggtggctagcgctataaccttatcattataataccaactagtgtgattaatatgtgacacgttagtgtgggtacaaatatgtacattatcgtctacgtcgtattcgatacatccgcatacagccaacaaatataaaatgacaaatactctaacgccgttcgtacccatcttgatgcggtttaataaatgttttgatttcaatttattgtaaaaaaagattcggttttatactgttcgatattctcattgcttatattttcatctatcatctccacacagtcaaatccgtggttagcatgcacctcatcaaccggtaaaagactatcggactcttctatcattataactctagaatatttaatttggtcattattaatcaagtcaattatcttatttttaacaaacgtgagtattttactcattttttataaaaacttttagaaatatacagactctatcgtgtgtctatatcttctttttatatccaatgtatttatgtctgatttttcttcatttatcatatataatggtccaaattctacacgtgcttcggattcatccagatcattaaggttcttataattgtaacatccttctcttccctcttctacatcttccttcttattcttattcttagcgtcacagaatctaccacagcaggatcccatgacgagcgtcatattaaactaatccattttcaattataatatacgattagtaatgaccattaaaataaaaatattcttcataaccggcaagaaagtgaaaagttcacattgaaactatgtcagtagtatacatcatgaaatgatgatatatatatactctattttggtggaggattatatgatataattcgtggataatcattcttaagacacatttcttcattcgtaaatcttttcacgttaaatgagtgtccatattttgcaatttcttcatatgatggcggtgtacgtggacgaggctgctcctgttcttgttgtagtcgccgactgtcgtgtctgcgtttagatccctccattatcgcgattgcgtagatggagtactattttataccttgtaattaaatttttttattaattaaacgtataaaaacgttccgtatctgtatttaagagccagatttcgtctaatagaacaaatagctacagtaaaaataactagaataattgctacacccactagaaaccacggatcgtaatacggcaatcggttttcgataataggtggaacgtatattttatttaaggacttaacaattgtctgtaaaccacaatttgcttccgcggatcctgtattaactatctgtaaaagcatatgttgaccgggcggagccgaacattctccgatatccaatttctgtatatctataatattattaacctccgcatacgcattacagttcttttctagcttggataccgcactaggtacatcgtctagatctattcctatttcctcagcgatagctcttctatccttttccggaagcaatgaaatcacttcaataaatgattcaaccatgagtgtgaaactaagtcgagaattactcatgcatttgttagttattcggagcgcgcaatttttaaactgtcctataacctctcctatatgaatagcacaagtgacattagtagggatagaatgttgagctaatttttgtaaataactatctataaaaagattatacaaagttttaaactctttagtttccgccatttatccagtctgagaaaatgtctctcataataaatttttccaagaaactaattgggtgaagaatggaaacctttaatctatatttatcacagtctgttttggtacacatgatgaattcttccaatgccgtactaaattcgatatctttttcgatttctggatatgtttttaataaagtatgaacaaagaaatggaaatcgtaataccagttatgtttaactttgaaattgttttttattttcttgttaatgattccagccacttgggaaaagtcaaagtcgtttaatgccgatttaatacgttcattaaaaacaaactttttatcctttagatgaattattattggttcattggaatcaaaaagtaagatattatcgggtttaagatctgcgtgtaaaaagttgtcgcagcatggtagttcgtaaattttaatgtataacagagccatctgtaaaaagataaactttatgtattgtaccaaagatttaaatcctaatttgatagctagctcggtatctactttatctgccgaatacagtgctaggggaaaaattataatatttcctctttcgtattcgtagttagttctcttttcatgttcgaaaaagtgaaacatgcggttaaaatagtttataacattaatattactgttaataactgccggataaaagtgggatagtaatttcacgaatttgatactgtcctttctctcgttaaacgcctttaaaaaaactttagaagaatatctcaatgatagttcctgaccatccatagtttgtatcaataatagcaacatatgaagaacacgtttatacagagtatgtaaaaatgttaatttatagtttaatcccatggcccacgcacacacgattaattttttttcatctccctttagattgttgtatagaaatttgggtactgtgaactccgccgtagtttccatgggactatataattttgtggcctcgaatacaaattttactacatagttatctatcttaaagactataccatatcctcctgtagatatgtgataaaaatcgtcgtttataggataaaatcgtttatccttttgttggaaaaaggatgaattaatgtaatcattctcttctatctttagtagtgtttccttattaaaattcttaaaataatttaacaatctaactgatggagcccaattttggtgtaaatctaattgggacattatattgttaaaatacaaacagtctcctaatataacagtatctgataatctatggggagacatccattgatattcaggggatgaatcattggcaacacccatttattgtacaaaaagccccaatttacaaacgaaagtccaggtttgatagagacaaactattaactattttgtctctgtttttaatttctttggtaatgaaattattcacaatatcagtatcttctttatctaccagagattttactaacttgataaccttggctgtctcattcaatagggtagtaatatttgtatgtgtgatattgatatcttttagaagtgattctttgatggtgccagcatacgaattacaataatgcagaaactcggttaacatgcaggaattatagtaagccaattccaattgttgcctgtgttgtattagagtgtcaatatgagcaatggtgtccttgcgtttctctgatagaatgcgagcagcgattttggcgttatcatttgacgatatttctggaatgacgaatcctgtttctactaactttttggtaggacaaagtgaaacaatcaagaagatagcttctcctcctatttgtggaagaaattgaactcctctagatgatctccttgacagatattggaccgaattacagaagtacctggaatgtaaagccctgaaaccccctcattttttaagcagattgttgccgtaaatcctgcactatgcccaagatagagagctcctttggtgaatccatctctatgtttcagtttaaccaagaaacagtcagctggtctaaaatttccatctctatctaatacagcatctaacttgatgtcaggaactatgaccggttatgttatatgtaacattgagtaaatccttaagttcataatcatcactgtcatcagttatgtacgatccaaacaatgtttctactggcatagtggatacgaagatgctatccatcagaatgtttccctgattagtattttctatatagctattcttctttaaacgattttccaaatcagtaactatgttcatttttttaggagtaggacgcctagccagtatggaagaggattttctagatcctctcttcaacatctttgatctcaatggaatgcaaaaccccatagtgtaacaaccaacgataaaaataatattgtttttcactttttataattttaccatctgactcatggattcattaatatctttataagagctactaacgtataattctttataactgaactgagatatatacaccggatctatggtttccataattgagtaaatgaatgctcggcaataactaatggcaaatgtataaaacaacgaaattatactagagttgttaaagttaatattttctatgagctgttccaataaattatttgttgtaactgcgttcaagtcataaatcatcttgatactatccagtaaaccgtttttaagttctggaatattattatcccattgtaaagcccctaattcgactatcgaatatcctgctctgatagcagtttcaatatcgacggacgtcaatactgtaataaaggtggtagtattgtcatcatcgtgataaactactggaatatggtcgttagtaggtacggtaactttacacaacgcgatatataactttccttttgtaccatttttaacgtagttgggacgtcctgcagggtattgttttgaagaaatgatatcgagaacagatttgatacgatatttgttggattcctgattatttactataatataatctagacagatagatgattcgataaatagagaaggtatatcgttggtaggataatacatccccattccagtattctcggatactctattaatgacactagttaagaacatgtcttctattctagaaaacgaaaacatcctacatggactcattaaaacttctaacgctcctgattgtgtctcgaatgcctcgtacaaggatttcaaggatgccatagattctttgaccaacgatttagaattgcgtttagcatctgatttttttattaaatcgaatggtcggctctctggtttgctaccccaatgataacaatagtcttgtaaagataaaccgcaagaaaatttatacgcatccatccaaataaccctagcaccatcggatgatattaatgtattattatagattttccatccacagttattgggccagtatactgttagcaacggtatatcgaatagattactcatgtaacctactagaatgatagttcgtgtactagtcataatatctttaatccaatctaagaaatttaaaattagattttttacactgttaaagttaacaaaggtattacccggatacgtggatatcatatatggtattggtccattatcagtaatagctccataaactgatacggcgatggtttttatatgtgtttgatctaacgaggaagaaattcgcgcccacaattcatctctagatatgtatttaatatcaaacggtaacacatcaatttcgggacgcgtatatgtttctaaatttttaatccaaatataatgatgacctatatgccctattatcatactgtcaactatagtacacctagagaacttacgatacatctgtttcctataatcgttaaattttacaaatctataacatgctaaaccttttgacgacaaccattcattaatttctgatatggaatctgtattctcaataccgtatcgttctaaagccagtgctatatctccctgttcgtgagaacgctttcgtataatatcgatcaacggataatctgaagtttttggagaataatatgactcatgatctatttcgtccataaacaatctagacataggaattggaggcgatgatcttaattttgtgcaatgagtcgtcaatcctataacttctaatattgtaatattcatcatcgacataacactatctatgttatcatcgtatattagtataccatgaccttcttcatttcgtgccaaaatgatatacagtcttaaatagttacgcaatatctcaatagtttcataattgttagctgttttcatcaaggtttgtatcctgtttaacatgatggcgttctatacgtttctattttttaaatttttaacgatttactgtggctagatacccaatctctctcaaatatttttttagcctcgcttacaagctgtttatctatactattaaaactgacgaatccgtgattttggtaatgggttccgtcgaaatttgccgaagtgatatgaacatattcgtcgtcgactatcaacaattttgtattattctgaatagtgaaaaccttcacagatagatcattttgaacacacaacgcgtctagacttctggcggttgccatagaatatacgtcgttcttatcccaattaccaactagaagtctgatcttaactcctctattaatggctgcttctataatggagttgtaaatgtcgggccaatagtagctattaccgtcgacacgtgtagtgggaactatggccaaatgttcaatatctatactagtcttagccgacttgagtttatcaataactacatcagtgtctagatctctagaatatcccaataggtgttccggagaatcagtaaagaacactccacctataggattcttaatatgatacgcagtgctaactggcagacaacaagccgcagagcataaattcaaccatgaattttttgcgctattaaaggctttaaaagtatcaaatcttctacgaagatctgtggccagcgggggataatcagaatatacacctaacgttttaatcgtatgtatagatcctccagtaaatgacgcgtttcctacataacatctttcattatctgacacccaaaaacaaccgagtagtagtcccacattattttttttatctatattaacggttataaaatttatatccgggcagtgactttgtagctctcccagatttcttttccctcgttcatctagcaaaactattattttaatccctttttcagatgcctcttttagtttatcaaaaataagcgctcccctagtcgtactcagaggattacaacaaaaagatgctatgtatatatatttcttagctagagtgataatttcgttaaaacattcaaatgttgttaaatgatcggatctaaaatccatattttctggtagtgtttctaccagcctacattttgctcccgcaggtaccggtgcaaatggccacatttagttaacataaaaacttatacatcctgttctatcaacgattctagaatatcatcggctatatcgctaaaattttcatcaaagtcgacatcacaacctaactcagtcaatatattaagaagttccatgatgtcatcttcgtctatttctatatccgtatccattgtagattgttgaccgattatcgagtttaaatcattactaatactcaatccttcagaatacaatctgtgtttcattgtaaatttataggcggtgtatttaagttggtagattttcaattatgtatcaatatagcaacagtagttcttgctcctccttgattctagcatcctcttcattattttcttctacgtacataaacatgtccaatacgttagacaacacaccgacgatggcggccgccacagacacgaatatgactaaaccgatgaccatttaaaaacccctctctagctttcacttaaactgtatcgattattcttttagaacatgtataatataaaaacattattctatttcgaatttaggcttccaaaaatttttcatccgtaaaccgataataatatatatagacttgttaatagtcggaataaatagattaatgcttaaactatcatcatctccacgattagagatacaatatttacattttttttgctgtttcgaaactttatcaatacacgttaatacaaacccaggaaggagatattgaaactgaggctgttgaaaatgaaacggtgaatacaataattcagataatgtaaaatcatgattccgtattctgatgatattagaactgctaatggatgtcgatggtatgtatctaggagtatctattttaacaaagcatcgatttgctaatatacaattatcattttgattaattgttattttattcatattcttaaaaggtttcatatttatcaattcttctacattaaaaatttccatttttaatttatgtagccccgcaatactcctcattacgtttcattttttgtctataatatccattttgttcatctcggtacatagattatccaattgagaagcgcatttagtagttttgtacattttaagtttattgacgaatcgtcgaaaactagttatagttaacattttattatttgataccctgatattaatacccctgccgttactattatttataactgatgtaatccacgtaacattggaattaactatcgatagtaatgcatcgacgcttccaaaattgtctattataaactcaccgataatttttttattacatgttttcatattcattaggattattaaatctttaatcttactacgattgtatgcgttgatattgcaagacgtcattctaaaagacggaggatctccatcaaatgccagacaatcacgtacaaagtacatggaaataggttttgttctattgcgcatcatagatttatatagaacacccgtagaaatactaatttgttttactctataaaatactaatgcatctatttcatcgttttgtataacgtctttccaagtgtcaaattccaaatttttttcattgatagtaccaaattcttctatctctttaactacttgcatagataggtaattacagtgatgcctacatgccgttttttgaaactgaatagatgcgtctagaagcgatgctacgctagtcacaatcaccactttcatatttagaatatatatatgtaaaaatatagtagaatttcattttgttttttttctatgctataaatgaattctcattttgcatctgctcatactccgttttatatcaataccaaagaaggaagatatctggttctaaaagccgttaaagtatgcgatgttagaactgtagaatgcgaaggaagtaaagcttcctgcgtactcaaagtagataaaccctcatcacccgcgtgtgagagaagaccttcgtccccttccagatgcgagagaatgaataacccaggaaaacaagttccgtttatgaggacggacatgctacaaaatatgttcgcggctaatcgcgataatgtagcttctagacttttgtcctaaaatacaattatatccttttcgatattaataaatccgtgtcgtccaggttttttatctctttcagtatgtgaatagataggtattttatctctattcatcatcgaatttaagagatccgataaacattgtttgtattctccagatgtcagcatctgatacaacaatatatgtgcacataaacctctggcacttatttcatgtaccttccccttatcactaaggagaatagtatttgagaaatatgtatacatgatattatcatgaattagatatacagaatttgtaacactctcgaaatcacacgatgtgtcggcgttaagatctaatatatcactcgataacacattttcatctagatacactagacattttttaaagctaaaatagtctttagtagtaacagtaactatgcgattattttcatcgatgatacatttcatcggcatattattacgcttaccatcaaagactataccatgtgtatatctaacgtattctagcatggttgccatacgcgcattaaacttttcaggatctttggatagatcttccaatctatctatttgagaaaacatttttatcatgttcaatagttgaaacgtcggatccactatatagatattatctataaagattttaggaactacgttcatggtatcctggcgaatattaaaactatcaatgatatgattatcgttttcatcttttatcaccatatagtttctaagatatgggattttacttaatataatattatttcccgtaataaattttattagaaatgccaaatctataagaaaagtcctcgaattagtttgaagaatatctatatcgccgtaccgtatatttggattaattagatatagagaatatgatccgtaacatatacaacttttattatggcgtctaagatattcttccatcaacttattaacatttttgactagggaagatacattatgacgtcccattacttttgccttgtctattactgcgacgttcatagaatttagcatatctcttgccaattcttccattgatgttacattataagaaattttagatgaaattacatttggagctttaatagtaagaactcctaatatgtccgtgtatgtggtcactaatacagattgtagttctataatcgtaaataatttacctatattatatgtttgagtctgtttagaaaagtagctaagtatacgatcttttatttctgatgcagatgtatcaacatcggaaaaaaatctttttttattcttttttactaaagatacaaatatgtctttgttaaaaacagttattttctgaatatttctagcttgtaattttaacatatgatattcgttcacactaggtactctgcctaaataggtttctataatctttaatgtaatattaggaaaagtattctgatcaggattcctattcattttgaggatttaaaactctgattattgtctaatatggtctcaacacaaactttttcacagagcgatagagtttttgataactcgtttttcttaagaaatataaaactactgtctccagagctcgctctatcttttattttatttaattcgatacaaactcctgatactggttcagaaagtaattcattaattttcagtcctttatagaagatatttaatatagataatacaaaatcttcagtttttgatatcgatctgattgatcctagaactagatatattaataacgtgctcattaggcagtttatggcagcttgataattagatatagtatattccagttcatatttattagataccgcattgcccagattttgatattctatgaattcctctgaaaataaatccaaaataactagacattctattttttgtggattagtgtactctcttccctctatcatgttcactactggtgtccacgatgataaatatctagagggaatataatatagtccataggatgccaatctagcaatgtcgaataactgtaattttattcttcgctcttcattatgaattgattcttgaggtataaacctaacacaaattatattattagacttttcgtatgtaatgtctttcatgttataagtttttaatcctggaatagaatctattttaatgaggcttttaaacgcagagttctccaacgagtcaaagcataatactctgttggttttcttatatacgatgttacgattttcttctttgaatggaataggtttttgaattagtttataattacaacataatagataaggaagtgtgcaaatagtacgcggaaaaaacataatagctcccctgttttcatccatggttttaagtaaatgatcactggcttctttagtcaatggatattcgaacattaaccgtttcatcatcattggacagaatccatatttcttaatgtaaagagtgatcaaatcattgtgtttattgtaccatcttgttgtaaatgtgtattcggttatcggatctgctcctttttctattaaagtatcgatgtcgatctcgtctaagaattcaactatatcgacatatttcatttgtatacacataaccattactaacgtagaatgtataggaagagatgtaacgggaacagggtttgttgattcgcaaactattctaatacataattcttctgttaatacgtcttgcacgtaatctattatagatgccaagatatctatataattattttgtaagatgatgttaactatgtgatctatataagtagtgtaataattcatgtatttcgatatatgttccaactctgtctttgtgatgtctagtttcgtaatatctatagcatcctcaaaaaatatattcgcatatattcccaagtcttcagttctatcttctaaaaaatcttcaacgtatggaatataataatctattttacctcttctgatatcattaatgatatagtttttgacactatcttctgtcaattgattcttattcactatatctaagaaacggatagcgtccctaggacgaactactgccattaatatctctattatagcttctggacataattcatctattataccagaattaatgggaactattccgtatctatctaacatagttttaagaaagtcagaatctaagacctgatgttcatatattggttcatacatgaaatgatctctattgatgatagtgactatttcattctctgaaaattggtaactcattctatatatgctttccttgttgatgaaggatagaatatactcaatagaatttgtaccaacaaactgttctcttatgaatcgtatatcatcatctgaaataatcatgtaaggcatacatttaacaattagagacttgtctcctgttatcaatatactattcttgtgataatttatgtgtgaggcaaatttgtccacgttctttaattttgttatagtagatatcaaatccaatggagctacagttcttggcttaaacagatatagtttttctggaacgaattctacaacattattataaaggactttgggtagataagtgggatgaaatcctattttaattaatgcgatagccttgtcctcgtgcagatatccaaacgcttttgtgatagtatggcattcattgtctagaaacgctctacgaatatctgtgacagatatcatctttagagaatatactagtcgcgttaatagtactacaatttgtattttttaatctatctcaataaaaaaattaatatgtatgattcaatgtataactaaactactaactgttattgataactagaatcagaatctaatgatgacgtaaccaagaagtttatctactgccaatttagctgcattatttttagcatctcgtttagattttccatctgccttatcgaatactcttccgtcgatatctacacaggcataaaatgtaggagagttactaggccccactgattcaatacgaaaagaccaatctctcttagttatttggcagtactcattaataatggtgacagggttagcatctttccaatcaataatttttttagccggaataacatcatcaaaagacttatgatcctctctcattgatttttcgcgggatacatcatctattatggcgtcagccataacatcagcatccggcttatccgcctccgttgtcataaaccaacgaggaggaatatcgtcggagctgtacaccatagcactacgttgaagatcgtacagagctttattaacttctcgcttctccatattaagttgtctagttagttgtgcagcagtagctccttcgattccaatgtttttaatagccgcacacacaatctctgcgtcagaacgctcgtcaatatagatcttagacatttttagagagaactaacacaaccagcaataaaactaatttattttatcatttttttattcatcatcctctggtggttcgtcgtttctatcgaatgtggatctgattaacccgtcatctataggtgatgctggttctggagattctggaggagatggattattatctggaagaatctctgttatttccttgttttcatgtatcgattgcgttgtaacattaagattgcgaaatgctctaaatttgggaggcttaaagtgttgtttgcaatctctacacgcatgtctaactagtggaggttcgtcagcggctctagtttgaatcatcatcggcgtagtattcctacttttacagttaggacacggtgtattgtatttctcgtcgagaacgttaaaataatcgttgtaactcacatcctttattttatctatattgtattctactcctttcttaatgcattttataccgaataagagatagcgaaggaattctttttcggtgccgctagtacccttaatcatatcacatagtgttttatattccaaatttgtggcaatagacggtttatttctatacgatagtttgtttctggaatcctttgagtattctataccaatattattctttgattcgaatttagtttcttcgatattagattttgtattacctatattcttgatgtagtactttgatgatttttccatggcccattctattaagtcttccaagttggcatcatccacatattgtgatagtaattctcggatatcagtagcggctaccgccattgatgtttgttcattggatgagtaactactaatgtatacattttccatttataacacttatgtattaactttgttcatttatattttttcattattatgttgatattaacaaaagtgaatatatatgttaataattgtattgtggttatacggctacaatttcataatgagtggaagtcagtgtccgatgatcaatgacgatagctttactctgaaaagaaagtatcaaatcgatagtgcggagtcaacaataaaaatggataagaagaggataaagtttcagaatagagccaaaatggtaaaagaaataaatcagacaataagagcagcacaaactcattacgagacattgaaactaggatacataaaatttaagagaatgattaggactactactctagaagatatagcaccatctattccaaataatcagaaaacttataaactattctcggacatttcagccatcggcaaagcatcacagaatccgagtaagatggtatatgctctgctgctttacatgtttcccaatttgtttggagatgatcatagattcattcgttatagaatgcatccaatgagtaaaatcaaacacaagatcttctctcctttcaaacttaatcttattagaatattagtggaagaaagattctataataatgaatgcagatctaataaatggagaataattggaacacaagttgataaaatgttgatagctgaatctgataaatatacaatagatgcaaggtataacctaaaacccatgtatagaatcaagggaaaatctgaagaagataccctctttatcaaacagatggtagaacaatgtgtgacatcccaggaattggtggaaaaagtgttgaagatactgtttagagatttgttcaagagtggagaatacaaagcgtacagatacgatgatgatgtagaaaatggatttattggattggatacactaaaattaaacattgttcatgatatagttgaaccatgtatgcctgttcgtaggccagtggctaagatactgtgtaaagaaatggtaaataaatactttgagaatccgctacatattattggtaaaaatcttcaagagtgcattgactttgttagtgaataggcatttcatctttctccaatactaattcaaattgttaaattaataatggatagtataaatagttattagtgataaaatagtaaaaataattattagaataagagtgtagtatcatagataactctcttctataaaaatggattttattcgtagaaagtatcttatatacacagtagaaaataatatagattttttaaaggatgatacattaagtaaagtaaacaattttaccctcaatcatgtactagctctcaagtatctagttagcaattttcctcaacacgttattactaaggatgtattagctaataccaatttttttgttttcatacatatggtacgatgttgtaaagtgtacgaagcggttttacgacacgcatttgatgcacccacgttgtacgttaaagcattgactaagaattatttatcgtttagtaacgcaatacaatcgtacaaggaaaccgtgcataaactaacacaagatgaaaaatttttagaggttgccgaatacatggacgaattaggagaacttataggcgtaaattatgacttagttcttaatccattatttcacggaggggaacccatcaaagatatggaaatcatttttttaaaactgtttaagaaaacagacttcaaagttgttaaaaaattaagtgttataagattacttatttgggcttacctaagcaagaaagatacaggcatagagtttgcggataatgatagacaagatatatacactctatttcaacaaactggtagaatagtccatagcaatctaacagaaacgtttagagattatatctttcccggagataagactagctattgggtgtggttaaacgaaagtatagctaatgatgcggatattgttcttaatagacacgccattaccatgtatgataaaattcttagttatatatactctgagataaaacaaggacgcgttaataaaaacatgcttaagttagtttatatctttgagcctgaaaaagatatcagagaacttctgctagaaatcatatatgatattcctggagatatcctatctattattgatgcaaaaaacgacgattggaaaaaatattttattagtttttataaagctaattttattaacggtaatacatttattagtgatagaacgtttaacgaggacttattcagagttgttgttcaaatagatcccgaatatttcgataatgaacgaattatgtctttattctctacgagtgctgcggacattaaacgatttgatgagttagatattaataacagttatatatctaatataatttatgaggtgaacgatatcacattagatacaatggatgatatgaagaagtgtcaaatctttaacgaggatacgtcgtattatgttaaggaatacaatacatacctgtttttgcacgagtcggatcccatggtcatagagaacggaatactaaagaaactgtcatctataaaatccaagagtagacggctgaacttgtttagcaaaaacattttaaaatattatttagacggacaattggctcgtctaggtcttgtgttagatgattataaaggagacttgttagttaaaatgataaaccatcttaagtctgtggaggatgtatccgcattcgttcgattttctacagataaaaaccctagtattcttccatcgctaatcaaaactattttagctagttataatatttccatcatcgtcttatttcaaaggtttttgagagataatctatatcatgtagaagaattcttggataaaagcatccatctaaccaagacggataagaaatatatacttcaattgataagacacggtagatcatagaacagaccaaatatattattaataatttgtatatacatagatataattatcacacatttttgataaatgggaactgctgcaacaattcagactcccaccaaattaatgaataaagaaaatgcagaaatgattttggaaaaaattgttgatcatatagttatgtatattagtgacgaatcaagtgattcagaaaataatcctgaatatattgattttcgtaacagatacgaagactatagatctctcattataaaaagtgatcacgagtttgtaaagctatgtaaaaatcatgcagagaaaagttctccagaaacgcaacaaatgattatcaaacacatatacgaacaatatcttattccagtatctgaagtactattaaaacctataatgtccatgggtgacataattacatataacggatgtaaagacaatgaatggatgctagaacaactctctaccctaaactttaacaatctccgcacatggaactcatgtagcataggcaatgtaacgcgtctgttttatacattttttagttatctgatgaaagataaactaaatatataagtataatcccattctaatactttaacctgatgtattacctgcatcttattagaatattaacctaactaaaagacataacatagttgataaaaagcggtaggatataaatattatggctgccaccgttccgcgttttgacgacgtgtacaaaaatgcacaaagaagaattctagatcaagaaacattttttagtagaggtctaagtagaccgttaatgaaaaacacatatctatttgataattacgcgtatggatggataccagaaactgcaatttggagtagtagatacgcaaacttagatgcaagtgactattatcccatttcgttgggattacttaaaaagttcgagtttctcatgtctctatataaaggtcctattcccgtatatgaagaaaaagtaaatactgaattcattgctaatggatcgttctctggtagatacgtatcatatcttcgaaagttttctgcccttccaacaaacgagtttattagttttttgttactgacttccattccaatctataatatcttgttctggtttaaaaatactcagtttgatattactaaacacacattattcagatacgtctatacagataatgccaaacacctggcgttggctaggtatatgcatcaaacaggagactataagcctttgtttagtcgtctcaaagagaattatatatttaccggtcccgttccaataagtatcaaagatatagatcaccctaatcttagtagagcaagaagtccatccgattatgagacattagctaatattagtactatattgtactttaccaagtatgatccggtattaatgtttttattgttttacgtacctgggtattcaattactacaaaaattactccagccgtagaatatctaatggataaactgaatctaacaaagagcgacgtacaactgttgtaaattattttatgcttcgtaaaatgtaggttttgaaccaaacattctttcaaagaatgagatgcataaaactttattatccaatagattgactatttcggacgtcaatcgtttaaagtaaacttcgtaaaatattctttgatcactgccgagtttaaaacttctatcgataattgtttcatatgttttaatatttacaagttttttggtccatggtacattagccggacaaatatatgcaaaataatatcgttctccaagttctatagtttctggattatttttattatattcagtaaccaaatacatattagggttatctgcggatttataatttgagtgatgcattcgactcaacataaataattctagaggagacgatctactatcaaattcggatcgtaaatctgtttctaaagaacggagaatatctatacatacctgattagaattcatccgtccttcagacaacatctcagacagtctggtcttgtatgtcttaatcatattcttatgaaacttggaaacatctcttctagtttcactagtacctttattaattctctcaggtacagattttgaattcgacgatgctgagtatttcatcgttgtatatttcttcttcgattgcataatcagattcttatataccgcctcaaactctattttaaaattattaaacaatactctattattaatcagtcgttctaactctttcgctatttctatagacttatcgacatcttgactgtctatctctgtaaacacggagtcggtatctccatacacgctacgaaaacgaaatctgtaatctataggcaacgatgttttcacaatcggattaatatctctatcgtccatataaaatggattacttaatggattggcaaaccgtaacataccgttagataactctgctccatttagtaccgattctagatacaagatcattctacgtcctatggatgtgcaactcttagccgaagcgtatgagtatagagcactatttctaaatcccatcagaccatatactgagttggctactatcttgtacgtatattgcatggaatcatagatggccttttcagttgaactggtagcctgttttagcatctttttatatctggctctctctgccaaaaatgttcttaatagtctaggaatggttccttctatcgatctatcgaaaattgctatttcagagatgaggttcggtagtctaggttcacaatgaaccgtaatatatctaggaggtggatatttctgaagcaagagctgattatttatttcttcttccaatctattggtactaacaacgacaccgactaatgtttccggagatagatttccaaagatacacacattaggatacagactgttataatcaaagattaatacattattactaaacattttttgttttggagcaaataccttaccgccttcataaggaaacttttgttttgtttctgatctaactaagatagttttagtttccaacaatagctttaacagtggacccttgatgactgtactcgctctatattcgaataccatggattgaggaagcacatatgttgacgcacccgcgtctgtttttgtttctactccataatactcccacaaatactgacacaaacaagcatcatgaatacagtatctagccatatctaaagctatgtttagattataatccttatacatctgagctaaatcaacgtcatcctttccgaaagataatttatatgtatcattaggtaaagtaggacatgatagtacgactttaaatccattttcccaaatatctttacgaattactttacatataatatcctcatcaacagtcacataattacctgtggttaaaacctttgcaaatgcagcggctttgcctttcgcgtccgtagtatcgtcaccgatgaacgtcatttctctaactcctctatttaatactttacccatgcaactgaacgcgttcttggatatagaatccaatttgtacgaatccaatttttcagatttttgaatgaatgaatatagatcgaaaaatatagttccattattgttattaacgtgaaacgtagtattggccatgccgcctactcccttatgactagactgatttctctcataaatacagagatgtacagcttcctttttgtccggagatctaaagataatcttctctcctgttaataactctagacgattagtaatatatctcagatcaaagttatgtccgttaaaggtaacgacgtagtcgaacgttagttccaacaattgtttagctattcgtaacaaaactatttcagaacatagaactagttctcgttcgtaatccatttccattagtgactgtatcctcaaacatcctctatcgacggcttcttgtatttcctgttccgttaacatctcttcattaatgagcgtaaacaataatcgtttaccacttaaatcgatataacagtaacttgtatgcgagattgggttaataaatacagaaggaaacttcttatcgaagtgacactctatatctagaaataagtacgatcttgggatatcgaatctaggtatttttttagcgaaacagttacgtggatcgtcacaatgataacatccattgttaatctttgtcaaatattgctcgtccaacgagtaacatccgtctggagatatcccgttagaaatataaaaccaactaatattgagaaattcatccatggtggcattttgtatgctgcgtttctttggctcttctatcaaccacatatctgcgacggagcattttctatctttaatatctagattataacttattgtctcgtcaatgtctatagttctcatctttcccaacggcctcgcattaaatggaggaggagacaatgactgatatatttcgtccgtaactacgtaataaaagtaatgaggaaatcgtataaatacggtctcgccatttcgacatctggatttcagatataaaaatctgttttcaccgtgactttcaaaccaattaatgcaccgaacatccatttatagaatttagaaatatattttcatttaaatgaatcccaaacattggggaagagccgtatggaccattatttttatagtactttcgcaagcgggtttagacggcaacatagaagcgtgtaaacgaaaactatatactatagtcagcactcttccatgtcctgcatgtagacggcacgcgactatcgctatagaggacaataatgtcatgtctagcgatgatctgaattatatttattattttttcatcagattatttaacaatttggcatctgatcccaaatacgcgatcgatgtgacaaaggttaaccctttataaacttaacccattataaaacttatgattagtcacgactgaaataaccgcgtgattattttttggtataattctacacggcatggtttctgtaactatgaattcaacccccgttacattagtgaaatctttaacaaacagcaagggttcgtcaaagacataaaactcattgtttacaatcgaaatagaccccctatcacacttaaaataaaaaatatccttatcctttaccaccaaataaaattctgattggtcaatgtgaatgtattcacttaacagttccacaaatttatttattaactccgaggcacatacatcgtcggtattttttatggcaaactttactcttccagcatccgtttctaaaaaaatattaacgagttccatttatatcatccaatattattgaaatgacgttgatggacagatgatacaaataagaaggtacggtacctttgtccaccatctcctccaattcatgctctattttgtcattaactttaatgtatgaaaacagtacgccacatgcttccatgacagtgtgtaacactttggatacaaaatgtttgacattagtataattgtccaagactgtcaatctataatagatagtagctataatatattctatgatggtattgaagaagatgacaatcttggcatattgatcatttaacacagacatggtatcaacagatagcttgaatgaaagagaatcagtaattggaataagcgtcttctcgatagagtgtccgtataccaacatgtctgatattttgatgtattccattaaattatttagttttttctttttattctcgttaaacagcatttctgtcaacggaccccaacatcgttgaccgattaagttttgattgatttttccgtgtaaggcgtatctagtcagatcgtatagcctatccaataatccatcatctgtgcgtagatcacatcgtacactttttaattctctatagaagagcgacagacagcaatttctttattctctacagatgtaagatacttgaagacattcctatgatgatgcagaattttggataacacggtattgatggtatctgttaccataattcctttgatggctgatagtgtcagagcacaagatttccaatctttgttttgatatctatatcagacagcatggtgcgtctgacaacacaaggattaagacggaaagatgaaatgattctctcaacatcttcaatggataccttgctattttttctggcattatctatatgtgcgagaatatcctctagagaatcagtatcctttttgatgatagtggatctcaatgacatgggacgtctaaaccttcttattctatcaccagattgcatggtgatttgtcttctttcttttatcataatgtaatctctaaattcatcggcaaattgtctatatctaaaatcataatatgagatgtttacctctacaaatatctgttcgtccaatgttagagtatctacatcagttttgtattccaaattaaacatggcaacggatttaattttatattcctctattaagtcctcgtcgataataacagaatgtagataatcatttaatccatcgtacatggttggaagatgcttgttgacaaaatctttaattgtcttgatgaaggtgggactatatctaacatcttgattaataaaatttataacattgtccataggatactttgtaactagttttatacacatctcttcatcggtaagtttagacagaatatcgtgaacaggtggtatattatattcatcagatatacgaagaacaatgtccaaatctatattgtttaatatattatatagatgtagcgtagctcctacaggaatatctttaactaagtcaatgatttcatcaaccgttagatctattttaaagttaatcatataggcattgatttttaaaaggtatgtagccttgactacattctcattaattaaccattccaagtcactgtgtgtaagaagattatattctatcataagcttgactacatttggtcccgataccattaaagaattcttatgatataaggaaacagattttaggtactcatctactctacaagaattttggagagccttaacgatatcagtgacgtttattatttcaggaggaaagaatctaacattgagaatatcggaattaatagcttccagatacagtgattttggcaatagtccgtgtaatccataatccagtaacacgagctggtgcttgctagacaccttttcaatgtttaatttttttgaaataagctttgataaagccttcctcgcaaattccggatacatgaacatgtcggcgacatgattaagtattgttttttcattattttctcaacaagttctcaataccccaatagatgatagaatatcacccaatgcgtccatgttgtctatttccaacaggtcgctatatccaccaatagaagtttttccaaaaaagattctaggaacagttctaccaccagtaatttgttcaaaatagtcacgcaattcattttcgggtttaaattctttaatatcgacaatttcatacgctcctcttttgaaactaaacttatttagaatatccagtgcatttctacaaaaaggacatgtatacttgacaaaaattgtcactttgttattggccaacctttgttgtacaaattcctcggccattttaatatttaagtgatataaaactatctcgacttatttaactctttagtcgagatatatggacgcagatagctatatgatagccaactacagaaggcaaacgctataaaaaacataattacgacgagcatatttataaatatttttattcagcattacttgatatagtaatattaggcacagtcaaacattcaaccactctcgatacattaactctctcattttctttaacaaattctacaatatcttcgtaaaaagattcttgaaactttttagaatatctatcgactctagatgaaatagcgttcgtcaacatactatgttttgtatacataaaggcgcccattttaacagtttctagtgacaaaatgctagcgatcctaggatcctttagaatcacatagattgacgattcgtctctcttagtaactctagtaaaataatcatacaatctagtacgcgaaataatattatccttgacttgaggagatctaaacaatctagttttgagaacatcgataagttcatcgggaatgacatacatactatctttaatagaactcttttcatccagttgaatggattcgtccttaaccaactgattaatgagatcttctattttatcattttccagatgatatgtatgtccattaaagttaaattgtgtagcgcttctttttagtctagcagccaatactttaacatcactaatatcgatatacaaaggagatgatttatctatggtattaagaattcgtttttcgacatctgtcaaaaccaattcctttttgcctgtatcatccagttttccatcctttgtaaagaaattattttctactagactattaataagactgataaggattcctccataattgcacaatccaaactttttaacaaaactagactttacaagatctacaggaatgcgtaattcaggtttcttagcttgtgattttttcttttgtggacattttcttgtgaccaactcatctaccatttcattgattttagcagtgaaataagctttcaatgcacgggcactgatactattgaaaacgagttgatcttcaaattccgccatttaagttcaccaaacaacttttaaatacaaatatatcaatagtagtagaataagaactataaaaaaaataataattaaccaataccaaccccaacaaccggtattattagttgatgtgactgttttctcatcacttagaacagatttaacaatttctataaagtctgtcaaatcatcttccggagaccccataaatacaccaaatatagcggcgtacaacttatccatttatacattgaatattggcttttctttatcgctatcttcatcatattcatcatcaatatcaacaagtcccagattacgagccagatcttcttctacattttcagtcattgatacacgttcactatctccagagagtccgataacgttagccaccacttctctatcaatgattagtttcttgagtgcgaatgtaatttttgtttccgttccggatctatagaagacgataggtgtgataattgccttggccaattgtctttctcttttactgagtgattctagttcaccttctatagatctgagaatggatgattctccagtcgaaacatattctaccatggatccgtttaatttgttgatgaagatggattcatccttaaatgttttctctgtaatagtttccaccgaaagactatgcaaagaatttggaatgcgttccttgtgcttaatgtttccatagacggcttctagaagttgatacaacataggactagccgcggtaacttttatttttagaaagtatccatcgcttctatcttgtttagatttatttttataaagtttagtctctccttccaacataataaaagtggaagtcatttgactagataaactatcagtaagttttatagagatagacgaacaattagcgtattgagaagcatttagtgtaacgtattcgatacattttgcattagatttactaatcgattttgcatactctataacacccgcacaagtctgtagagaatcgctagatgcagtaggtcttggtgaagtttcaactctcttcttgattaccttactcatgattaaacctaaataattgtactttgtaatataatgatatatattttcactttatctcatttgagaataaaaatgtttttgtttaaccactgcatgatgtacagatttcggaatcgcaaaccaccagtggttttattttatccttgtccaatgtgaattgaatgggagcggatgcgggtttcgtacgtagatagtacattcccgtttttagaccgagactccatccgtaaaaatgcatactcgttagtttggaataactcggatctgctatatggatattcatagattgactttgatcgatgaaggctcccctgtctgcagccatttttatgatcgtcttttgtggaatttcccaaatagttttataaactcgcttaatatcttctggaaggtttgtattctgaatggatccaccatctgccataatcctattcttgatctcatcattccataattttctctcggttaaaactctaaggagatgcggattaactacttgaaattctccagacaatactctccgagtgtaaatattactggtatacggttccaccgactcattatttcccaaaatttgagcagttgatgcagtcggcataggtgccaccaataaactatttctaagaccgtatgttctgattttatcttttagaggttcccaattccaaagatccgacggtacaacattccaaagatcatattgtagaataccgttactggcgtacgatcctacatatgtatcgtatggtccttccttctcagctagttcacaactcgcctctaatgcaccgtaataaatggtttcgaagatcttcttatttagatcttgtgcttccaggctatcaaatggataatttaagagaataaacgcgtccgctaatccttgaacaccaataccgataggtctatgtctcttattagagatttcagcttctggaataggataataattaatatctataattttattgagatttctgacaattactttgaccacatccttcagtttgagaaaatcaaatcgcccatctattacaaacatgttcaaggcaacagatgccagattacaaacggctacctcattagcatccgcatattgtattatctcagtgcaaagattactacacttgatagttcctaaattttgttgattactctttttgttacacgcatccttataaagaatgaatggagtaccagtttcaatctgagattctataatcgctttccagacgactcgagcctttattatagatttgtatctcctttctctttcgtatagtgtatacaatcgttcgaactcgtctccccaaacattgtccaatccaggacattcatccggacacatcaacgaccactctccgtcatccttcactcgtttcataaagagatcaggaatccaaagagctataaatagatctctggttctatgttcctcgtttcctgtattctttttaagatcgaggaacgccataatatcagaatgccacggttccaagtatatggccataactccaggccgtttgtttcctccctgatctatgtatctagcggtgttattataaactctcaacattggaataataccgtttgatataccattggtaccggagatatagcttccactggcacgaatattactaattgatagacctattccccctgccattttagagattaatgcgcatcgttttaacgtgtcatagataccctctatgctatcatcgatcatgttaagtagaaaacagctagacatttggtgacgactagttcccgcattaaataaggtaggagaagcgtgcgtaaaccatttttcagaaagtagattgtacgtctcaatagctgagtctatatcccattgatgaattcctactgcgacacgcattaacatgtgctgaggtctttcaacgatcttgttgtttattttcaacaagtaggatttttccaaagttttaaaaccaaaatagttgtatgaaaagtctcgttcgtaaataataaccgagttgagtttatccttatatttgttaactatatccatggtgatacttgaaataatcggagaatgtttcccatttttaggattaacatagttgaataaatcctccatcacttcactaaatagtttttttgtttccttgtgtagatttgatacggctattctggcggctagaatggcataatccggatgttgtgtagtacaagtggctgctatttcggctgccagagtgtccaattctaccgttgttactccattatatattccttgaataaccttcatagctattttaataggatctatatgatccgtgtttaagccataacataattttctaatacgagacgtgattttatcaaacatgacattttccttgtatccatttcgtttaatgacaaacatttttgttggtgtaataaaaaaaattatttaacttttcattaatagggatttgacgtatgtagcgtacaaaattatcgttcctggtatatagataaagagtcctatatatttgaaaatcgttacggctcgattaaactttaatgattgcatagtgaatatatcattaggatttaactccttgactatcatggcggcgccagaaattaccatcaaaagcattaatacagttatgccgatcgcagttagaacggttatagcatccaccatttatatctaaaaattagatcaaagaatatgtgacaaagtcctagttgtatactgagaattgacgaaacaatgtttcttacatattttttttttattagtaaccgacttaatagtaggaactggaaaactagacttgattattctataagtatagatacccttccaaataatattctctttgataaaagttccagaaaatgtagaattttttaaaaagttatcttttgctattaccaagattgtgtttagacgcttattattaatatgagtgatgaaatccacaccgcctctagatatcgcttttatttccacattagatggtaaatccaatagtgaaactatctttttaggaatgtatggactcgcgtttagaggagtgaacgtcttaggcgtcggaaaggggccggcctttttttctagacactaaataaatagtaagattaaattaattataaaattatgtatataatattaattataaaattatgtatatgatttactaactttagttagataaattaataatacataaattttagtatattaatattataaattaataatacataaattttagtatattaatattatattttaaatatttatttagtgtctagaaaaaaaggcctagcaggcc

SEQ ID NO: 3 - DNA, 63035 bp, synthetic construct
  source 1..63035: mol_type = other DNA
ggcctagcaggcctttttttctagacactaaataaatagtaagattaaattaattataaaattatgtatataatattaattataaaattatgtatatgatttactaactttagttagataaattaataatacataaattttagtatattaatattataaattaataatacataaattttagtatattaatattatattttaaatatttatttagtgtctagaaaaaaaggccggccataaaaatgtttttgtttaaccactgcatgatgtacagatttcggaatcgcaaaccaccagtggttttattttatccttgtccaatgtgaattgaatgggagcggatgcgggtttcgtacgtagatagtacattcccgtttttagaccgagactccatccgtaaaaatgcatactcgttagtttggaataactcggatctgctatatggatattcatagattgactttgatcgatgaaggctcccctgtctgcagccatttttatgatcgtcttttgtggaatttcccaaatagttttataaactcgcttaatatcttctggaaggtttgtattctgaatggatccaccatctgccataatcctattcttgatctcatcattccataattttctctcggttaaaactctaaggagatgcggattaactacttgaaattctccagacaatactctccgagtgtaaatattactggtatacggttccaccgactcattatttcccaaaatttgagcagttgatgcagtcggcataggtgccaccaataaactatttctaagaccgtatgttctgattttatcttttagaggttcccaattccaaagatccgacggtacaacattccaaagatcatattgtagaataccgttactggcgtacgatcctacatatgtatcgtatggtccttccttctcagctagttcacaactcgcctctaatgcaccgtaataaatggtttcgaagatcttcttatttagatcttgtgcttccaggctatcaaatggataatttaagagaataaacgcgtccgctaatccttgaacaccaataccgataggtctatgtctcttattagagatttcagcttctggaataggataataattaatatctataattttattgagatttctgacaattactttgaccacatccttcagtttgagaaaatcaaatcgcccatctattacaaacatgttcaaggcaacagatgccagattacaaacggctacctcattagcatccgcatattgtattatctcagtgcaaagattactacacttgatagttcctaaattttgttgattactctttttgttacacgcatccttataaagaatgaatggagtaccagtttcaatctgagattctataatcgctttccagacgactcgagcctttattatagatttgtatctcctttctctttcgtatagtgtatacaatcgttcgaactcgtctccccaaacattgtccaatccaggacattcatccggacacatcaacgaccactctccgtcatccttcactcgtttcataaagagatcaggaatccaaagagctataaatagatctctggttctatgttcctcgtttcctgtattctttttaagatcgaggaacgccataatatcagaatgccacggttccaagtatatggccataactccaggccgtttgtttcctccctgatctatgtatctagcggtgttattataaactctcaacattggaataataccgtttgatataccattggtaccggagatatagcttccactggcacgaatattactaattgatagacctattccccctgccattttagagattaatgcgcatcgttttaacgtgtcatagataccctctatgctatcatcgatcatgttaagtagaaaacagctagacatttggtgacgactagttcccgcattaaataaggtaggagaagcgtgcgtaaaccatttttcagaaagtagattgtacgtctcaatagctgagtctatatcccattgatgaattcctactgcgacacgcattaacatgtgctgaggtctttcaacgatcttgttgtttattttcaacaagtaggatttttccaaagttttaaaaccaaaatagttgtatgaaaagtctcgttcgtaaataataaccgagttgagtttatccttatatttgttaactatatccatggtgatacttgaaataatcggagaatgtttcccatttttaggattaacatagttgaataaatcctccatcacttcactaaatagtttttttgtttccttgtgtagatttgatacggctattctggcggctagaatggcataatccggatgttgtgtagtacaagtggctgctatttcggctgccagagtgtccaattctaccgttgttactccattatatattccttgaataaccttcatagctattttaataggatctatatgatccgtgtttaagccataacataattttctaatacgagacgtgattttatcaaacatgacattttccttgtatccatttcgtttaatgacaaacatttttgttggtgtaataaaaaaaattatttaacttttcattaatagggatttgacgtatgtagcgtacaaaattatcgttcctggtatatagataaagagtcctatatatttgaaaatcgttacggctcgattaaactttaatgattgcatagtgaatatatcattaggatttaactccttgactatcatggcggcgccagaaattaccatcaaaagcattaatacagttatgccgatcgcagttagaacggttatagcatccaccatttatatctaaaaattagatcaaagaatatgtgacaaagtcctagttgtatactgagaattgacgaaacaatgtttcttacatattttttttttattagtaaccgacttaatagtaggaactggaaaactagacttgattattctataagtatagatacccttccaaataatattctctttgataaaagttccagaaaatgtagaattttttaaaaagttatcttttgctattaccaagattgtgtttagacgcttattattaatatgagtgatgaaatccacaccgcctctagatatcgcttttatttccacattagatggtaaatccaatagtgaaactatctttttaggaatgtatggactcgcgtttagaggagtgaacgtcttaggcgtcggaaaggatgattcatcaaacgaataaacaatttcacaaatggatgttaatgtattagtaggaaattttttgacgctagtggaattgaagattctaatggatgatgttctacctatttcatccgataacatgttaatttccgacaccaacggttttaatatttcgatgatatacggtagtctctctttcggacttatatagcttattccacaatacgagtcattatatactccaaaaaacaaaataactagtataaaatctgtatcgaatgggaaaaacgaaattatcgacataggtatagaatctggaacattgaacgtattaatacttaattctttttctgtggtaagtaccgataggttattgacattgtatggttttaaatattctataacttgagacttgatagatattagtgatgaattgaaaattatttttatcaccacgtgtgtttcaggatcatcgtcgacgcccgtcaaccaaccgaatggagtaaaataaatatcattaatatatgctctagatattagtatttttatcaatcctttgattatcatcttctcgtaggcgaatgattccatgatcaagagtgatttaagaacatcctccggagtattaatgggcttagtaaacagtccatcgttgcaataataaaagttatccaagttaaaggatattatgcattcgtttaaagatatcacctcatctgacggagacaattttttggtaggttttagagactttgaagctacttgtttaacaaagttattcatcgtcgtttactattctatttaattttgtagttaatttatcacatatcacattaattgactttttggtccatttttccatacgtttatattcttttaatcctgcgttatccgtttccgttatatccagggatagatcttgcaagttaaatagaatgctcttaaataatgtcattttcttatccgctaaaaatttaaagaatgtataaacctttttcagagatttgaaactcttaggtggtgtcctagtacacaatatcataaacaaactaataaacattccacattcagattccaacagctgattaacttctacattaatacagcctattttcgctccaaatgtacattcgaaaaatctgaataaaacatcgatgtcacaatttgtattatccaatacagaatgtttgtgattcgtgttaaaaccatcggagaaggaataaaaataaaaattattatagtggtggaattcagttggaatattgcctccggagtcataaaaggatactaaacattgttttttatcataaattacacatttccaatgagacaaataacaaaatccaaacattacaaatctagaggtagaacttttaattttgtctttaagtatatacgataagatatgtttattcataaacgcgtcaaatttttcatgaatcgctaaggagtttaagaatctcatgtcaaattgtcctatataatccacttcggatccataagcaaactgagagactaagttcttaatacttcgattgctcatccaggctcctctctcaggctctattttcatcttgacgacctttggattttcaccagtatgtattcctttacgtgataaatcatcgattttcaaatccatttgtgagaagtctatcgccttagatactttttcccgtagtcgaggtttaaagaaatacgctaacggtatactagtaggtaactcaaagacatcatatatagaatggtaacgcgtctttaactcgtcggttaactctttcttttgatcgagttcgtcgctactattgggtctgctcaggtgccccgactctactagttccaacatcataccgataggaatacaagacactttgccggcggttgtagatttatcatatttctccactacatatccgttacaatttgttaaaaatttagatacatctatattgctacataatccagctagtgaatatatatgacataataaattggtaaatcctagttctggtattttactaattactaaatctgtatatctttccatttatcatggaaaagaatttaccagatatcttcttttttccaaactgcgttaatgtattctcttacaaatattcacaagatgaattcagtaatatgagtaaaacggaacgtgatagtttctcattggcggtgtttccagttataaaacatagatggcataacgcacacgttgtaaaacataaaggaatatacaaagttagtacagaagcacgtggaaaaaaagtatctcctccatcactaggaaaacccgcacacataaacctaaccgcgaagcaatatatatacagtgaacacacaataagctttgaatgttatagttttctaaaatgtataacaaatacagaaatcaattcgttcgatgagtatatattaagaggactattagaagctggtaatagtttacagatattttccaattccgtaggtaaacgaacagatactataggtgtactagggaataagtatccatttagcaaaattccattggcctcattaactcctaaagcacaacgagagatattttcagcgtggatttctcatagacctgtagttttaactggaggaactggagtgggtaagacgtcacaggtacccaagttattgctttggtttaattatttatttggtggattctctactctagataaaatcactgactttcacgaaagaccagtcattctatctcttcctaggatagctttagttagattgcatagcaataccattttaaaatcattgggatttaaggtactagatggatctcctatttctttacggtacggatctataccggaagaattaataaacaaacaaccaaaaaaatatggaattgtattttctacccataagttatctctaacaaaactatttagttatggcactcttattatagacgaagttcatgagcatgatcaaataggagatattattatagcagtagcgagaaagcatcatacgaaaatagattctatgtttttaatgactgccacgttagaggatgacagggaacggctaaaagtatttttacctaatcccgcatttatacatattcctggagatacactgtttaaaattagcgaggtatttattcataataagataaatccatcttccagaatggcatacatagaagaagaaaagagaaatttagttactgctatacagatgtatactcctcctgatggatcatccggtatagtctttgtggcatccgttgcacagtgtcacgaatataaatcatatttagaaaaaagattaccgtatgatatgtatattattcatggtaaggtcttagatatagacgaaatattagaaaaagtgtattcatcacctaatgtatcgataattatttctactccttatttggaatccagcgttactatacgcaatgttacacacatttatgatatgggtagagtttttgtccccgctccttttggaggatcgcaagaatttatttctaaatctatgagagatcaacgaaaaggaagagtaggaagagttaatcctgggacatacgtatatttctatgatctgtcttatatgaagtctatacagcgaatagattcagaatttctacataattatatattgtacgctaataagtttaatctaacactccccgaagatttgtttataatccctacaaatttggatattctatggcgtacaaaggaatatatagactcgttcgatattagtacagaaacatggaataaattattatccaattattatatgaagatgatagagtatgctaaactttatgtactaagtcctattctcgctgaggagttggataattttgagaggacgggagaattaactagtattgtacaagaagccattttatctctaaatttacgaattaagattttaaattttaaacataaagatgatgatacgtatatacacttttgtaaaatattattcggtgtctataacggaacaaacgctactatatattatcatagacctctaacgggatatatgaatatgatttcagatactatatttgttcctgtagataataactaaaaatcaaactctaatgaccacatctttttttagagatgaaaaattttccacatctccttttgtagacacgactaaacattttgcagaaaaaagtttattagtgtttagataatcgtatacttcatcagtgtagatagtaaatgtgaacagataaaaggtattcttgctcaatagattggtaaattccatagaatatattaatcctttcttcttgagatcccacatcatttcaaccagagacgttttatccaatgatttacctcgtactataccacatacaaaactagattttgcagtgacgtcgtatctggtattcctaccaaacaaaattttacttttagttcttttagaaaattctaaggtagaatctctatttgccaatatgtcatctatggaattaccactagcaaaaaatgatagaaatatatattgatacatcgcagctggttttgatctactatactttaaaaacgaatcagattccataattgcctgtatatcatcagctgaaaaactatgttttacacgtattccttcggcatttctttttaatgatatatcttgtttagacaatgataaagttatcatgtccatgagagacgcgtctccgtatcgtataaatatttcattagatgttagacgcttcattaggggtatacttctataaggtttcttaatcagtccatcattggttgcgtcaagaactactatcggatgttgttgggtatctctagtgttacacatggccttactaaagtttgggtaaataactatgatatctctattaattatagatgcatatatttcatttgtcaaggatattagtatcgacttgctatcgtcattaatacgtgtaatgtaatcatataaatcatgcgatagccaaggaaaatttaaatagatgttcatcatataatcgtcgctataattcatattaatacgttgacattgactaatttgtaatatagcctcgccacgaagaaagctctcgtattcagtttcatcgataaaggataccgttaaatataactggttgccgatagtctcatagtctattaagtggtaagtttcgtacaaatacagaatccctaaaatattatctaatgttggattaatctttaccataactgtataaaatggagacggagtcataactattttaccgtttgtacttactggaatagacgaaggaataatctccggacatgctggtaaagacccaaatgtctgtttgaagaaatccaatgttccaggtcctaatctcttaacaaaaattacgatattcgatcccgatatcctttgcattctatttaccagcatatcacgaactatattaagattatctatcatgtctattctcccaccgttatataaatcgcctccgctaagaaacgttagtatatccatacaatggaatacttcatttctaaaatagtattcgttttctaattctttaatgtgaaatcgtatactagaaagggaaaaattatctttgagttttccgttagaaaagaaccacgaaactaatgttctgattgcgtccgattccgttgctgaattaatggatttacaccaaaaactcatataacttctagatgtagaagcattcgctaaaaaattagtagaatcaaaggatataagtagatgttccaacaagtgagcaattcccaagatttcatctatatcattctcgaatccgaaattagaaattcccaagtagatatcctttttcatccgatcgttgatgaaaatacgaactttattcggtaagacaatcatttactaaggagtaaaataggaagtaatgttcgtatgtcgttatcatcgtataaattaaaggtgtgttttttaccattaagtgacattataattttaccaatattggaattataatataggtgtatttgcgcactcgcgacggttgatgcatcggtaaatatagctgtatctaatgttctagtcggtatttcatcatttcgctgtctaataatagcgttttctctatctgtttccattacagctgcctgaagtttattggtcggataatatgtaaaataataagaaatacatacgaataacaaaaataaaataagatataataaagatgccatttagagatctaattttgtttaacttgtccaaattcctacttacagaagatgaggaatcgttggagatagtgtcttccttatgtagaggatttgaaatatcttatgatgacttgataacttactttccagataggaaataccataaatatatttctaaagtatttgaacatgtagatttatcggaggaattaagtatggaattccatgatacaactctgagagatttagtctatcttagattgtacaagtattccaagtgtatacggccgtgttataaattaggagataatctaaaaggcatagttgttataaaggacaggaatatttatattagagaagcaaatgatgacttgatagaatatctcctcaaggaatacactcctcagatttatacatattctaatgagcgcgtccccataactggttcaaaattaattctttgtggattttctcaagttacatttatggcgtatacaacgtcgcatataacaacaaataaaaaggtagatgttctcgtttccaaaaaatgtatagatgaactagtcgatccaataaattatcaaatacttcaaaatttatttgataaaggaagcggaacaataaacaaaatactcaggaagatattttattcggtaaccggtggccaaactccataatttgctttttctatttcggattttagaatttccaaattcaccagcgatttatcggttttggtgaaatccaaggatttattaatgtccacaaatgccatttgttttgtctgtggattgtatttgaaaatggaaacgatgtagttagatagatgcgctgcaaagtttcctattagggttccgcgctttacgtcacccagcatacttgaatcaccatcctttaaaaaaaatgataagatatcaacatggagtatatcatactcggattttaattcttctactgcatcactgacattttcacaaatactacaatacggtttaccgaaaataatcagtacgttcttcatttatgggtatcaaaaacttaaaatcgttactgctggaaaataaatcactgacgatattagatgataatttatacaaagtatacaatggaatatttgtggatacaatgagtatttatatagccgtcgccaattgtgtcagaaacttagaagagttaactacggtattcataaaatacgtaaacggatgggtaaaaaagggagggcatgtaaccctttttatcgatagaggaagtataaaaattaaacaagacgttagagacaagagacgtaaatattctaaattaaccaaggacagaaaaatgctagaattagaaaagtgtacatccgaaatacaaaatgttaccggatttatggaagaagaaataaaggcagaaatgcaattaaaaatcgataaactcacatttcaaatatatttatctgattctgataacataaaaatatcattgaatgagatactaacacatttcaacaataatgagaatgttacattattttattgtgatgaacgagacgcagaattcgttatgtgtctcgaggctaaaacacatttctctaccacaggagaatggccgttgataataagtaccgatcaggatactatgctatttgcatctactgataatcatcctaagatgataaaaaacttaactcaactgtttaaatttgttccctcggcagaggataactatttagcaaaattaacggcgttagtgaatggatgtgatttctttcctggactctatggggcatctataacacccaccaacttaaacaaaatacaattgtttagtgattttacaatcgataatatagtcactagtttggcaattaaaaattattatagaaagactaactctaccgtagacgtgcgtaatattgttacgtttataaacgattacgctaatttagacgatgtctactcgtatgttcctccttgtcaatgcactgttcaagaatttatattttccgcattagatgaaaaatggaacaattttaaatcatcttatttagagaccgttccgttaccctgccaattaatgtatgcattagaaccacgcaaggagattgatgtttcagaagttaaaactttatcatcttatatagatttcgaaaatactaaatcagatatcgatgttataaaatctatatcttcgatcttcggatattctaacgaaaactgtaacactatagtgttcggcatctataaggataatttactactgagtataaatagttcattttactttaacgatagtctgttaataaccaatactaaaagtgataatataataaatataggttactagattaaaaatggtgttccaactcgtgtgctctacgtgcggcaaagatatttctcacgaacgatataaattgattatacgaaaaaaatcattaaaggatgtactcgtcagtgtaaagaacgaatgttgtaggttaaaattatctacacaaatagaacctcaacgtaacttaacagtgcaacctctattggatataaactaatatggatccggttaattttatcaagacatatgcgcctagaggttctattatttttattaattataccatgtcattaacaagtcatttgaatccatcgatagaaaaacatgtgggtatttattatggtacgttattatcggaacacttggtagttgaatctacctatagaaaaggagttcgaatagtcccattggatagtttttttgaaggatatcttagtgcaaaagtatacatgttagagaatattcaagttatgaaaatagcagctgatacgtcattaactttattgggtattccgtatggatttggtcataatagaatgtattgttttaaattggtagctgaatgttataaaaatgccggtattgatacatcgtctaaacgaatattaggtaaagatatttttctgagccaaaacttcacagatgataatagatggataaagatatatgattctaataatttaacattttggcaaattgattaccttaaagggtgagttaatatgcataactactcctccgttgttttttccctcgttctttttcttaacgttgtttgccatcactctcataatgtaaagatattctaaaatggtaaacttttgcatatcggacgcagaaattggtataaatgttgtaattgtattatttcccgtcaatggactagtcacagctccatcagttttatatcctttagagtatttctcactcgtgtctaacattctagagcattccatgatctgtttatcgttgatattggccggaaagatagattttttattttttattatattactattggcaattgtagatataacttctggtaaatatttttctaccttttcaatctcttctattttcaagccggctatatattctgctatattgttgctagtatcaataccttttctggctaagaagtcatatgtggtattcactatatcagttttaactggtagttccattagcctttccacttctgcagaataatcagaaattggttctttaccagaaaatccagctactataataggctcaccgatgatcattggcaaaatcctatattgtaccagattaatgagagcatatttcatttccaataattctgctagttcttgagacattgatttatttgatgaatctagttggttctctagatactctaccatttctgccgcatacaataacttgttagataaaatcagggttatcaaagtgtttagcgtggctagaatagtgggcttgcatgtattaaagaatgcggtagtatgagtaaaccgttttaacgaattatatagtctccagaaatctgtggcgttacatacatgagccgaatgacatcgaagattgtccaatatttttaatagctgctctttgtccattatttctatatttgactcgcaacaattgtagataccattaatcactgattcctttttcgatgccggacaatagcacaattgtttagctttggactctatgtattcagaattaatagatatatctctcaatacagattgcactatacattttgaaactatgtcaaaaattgtagaacgacgctgttctgcagccatttaactttaaataatttacaaaaatttaaaatgagcatccgtataaaaatcgataaactgcgccaaattgtggcatatttttcagagttcagtgaagaagtatctataaatgtagactcgacggatgagttaatgtatatttttgccgccttgggcggatctgtaaacatttgggccattatacctctcagtgcatcagtgttctaccgcggagccgaaaacattgtgtttaatcttcctgtgtccaaggtaaaatcgtgtttgtgtagttttcacaatgatgccatcatagatatagaacctgatctggaaaataatctagtaaaactttctagttatcatgtagtaagtgtcgattgtaacaaggaactgatgcctattaggacagatactactatttgtctaagtatagatcaaaagaaatcttacgtgtttaattttcacaagtatgaagaaaaatgttgtggtagaaccgtcattcatttagaatggttgttgggctttatcaagtgtattagtcagcatcagcatttggctattatgtttaaagatgacaatattattatgaagactcctggtaatactgatgcgttttccagggaatattctatgactgaatgttctcaagaactacaaaagttttctttcaaaatagctatctcgtctctcaacaaactacgaggattcaaaaagagagtcaatgtttttgaaactagaatcgtaatggataatgacgataacattctaggaatgttgttttcggatagagttcaatcctttaagatcaacatctttatgacgtttttagattaatactttcaatgagataaatatgggtggcagagtaagtgttgagctccctaaacgggatccgcctccgggagtacccactgatgagatgttattaaacgtggataaaatgcatgacgtgatagctcccgctaagcttttagaatatgtgcatataggaccactagcaaaagataaagaggataaagtaaagaaaagatatccagagtttagattagtcaacacaggacccggtggtctttcggcattgttaagacaatcgtataatggaaccgcacccaattgctgtcgcacttttaatcgtactcattattggaaaaaggatggaaagatatcagataagtatgaagagggtgcagtattagaatcgtgttggccagacgttcacgacactggaaaatgcgatgttgatttattcgactggtgtcagggggatacgttcgatagaaacatatgccatcagtggatcggttcagcctttaataggagtgatagaactgtagagggtcaacaatcgttaataaatctgtataataagatgcaaacattatgtagtaaagatgctagtgtaccaatatgtgaatcatttttgcatcatttacgcgcacacaatacagaagatagcaaagagatgatcgattatattctaagacaacagtctgcggactttaaacagaaatatatgagatgtagttatcccactagagataagttagaagagtcattaaaatatgcggaacctcgagaatgttgggatccagagtgttcgaatgccaatgttaatttcttactaacacgtaattataataatttaggactttgcaatattgtacgatgtaatactagcgtgaacaacttacagatggataaaacttcctcattaagattgtcatgtggattaagcaatagtgatagattttctactgttcccgtcaatagagcaaaagtagttcaacataatattaaacattcgttcgacctaaaattgcatttgatcagtttattatctctcttggtaatatggatactaattgtagctatttaaatgggtgccgcggcaagcatacagacgacggtgaatacactcagcgaacgtatctcgtctaaattagaacaagaagcgaacgctagtgctcaaacaaaatgtgatatagaaatcggaaatttttatatccgacaaaaccatggatgtaacctcactgttaaaaatatgtgctctgcggacgcggatgctcagttggatgctgtgttatcagccgctacagaaacatatagtggattaacaccggaacaaaaagcatacgtaccagctatgtttactgctgcgttaaacattcagacgagtgtaaacactgttgttagagattttgaaaattatgtgaaacagacttgtaattctagcgcggtcgtcgataacaaattaaagatacaaaacgtaatcatagatgaatgttacggagccccaggatctccaacaaatttggaatttattaatacaggatctagcaaaggaaattgtgccattaaagcgttgatgcaattgacgactaaggccactactcaaatagcacctagacaagttgctggtacaggagttcagttttatatgattgttatcggtgttataatattggcagcgttgtttatgtactatgccaagcgtatgttgttcacatccaccaatgataaaatcaaacttattttagccaataaggaaaacgtccattggactacttacatggacacattctttagaacttctccgatggttattgctaccacggatatgcaaaactgaaaatatattgataatattttaatagattaacatggaagttatcgctgatcgtctagacgatatagtgaaacaaaatatagcggatgaaaaatttgtagattttgttatacacggtctagagcatcaatgtcctgctatacttcgaccattaattaggttgtttattgatatactattatttgttatagtaatttatatttttacggtacgtctagtaagtagaaattatcaaatgttgttggcgttggtggcgctagtcatcacattaactattttttattactttatactataatagtactagactgacttctaacaaacatctcacctgccataaataaatgcttgatattaaagtcttctatttctaacactattccatctgtggaaaataatactctgacattatcgctaattgacacatcggtgagtgatatgcctataaagtaataatcttctttgggcacatataccagtgtaccaggttctaacaacctatttactggtgctcctgtagcatactttttctttaccttgagaatatccatcgtttgcttggtcaatagcgatatgtgattttttatcaaccactcaaaaaagtaattggagtgttcatatcctctacgggctattgtctcatggccgtgtatgaaatttaagtaacacgactgtggtagatttgttctatagagccggttgccgcaaatagatagaactaccaatatgtctgtacaaatgttaaacattaattgattaacagaaaaaacaatgttcgttctgggaatagaaaccagatcaaaacaaaattcgttagaatatatgccacgtttatacatggaatataaaataactacagtttgaaaaataacagtatcatttaaacatttaacttgcggggttaatttcacaactttactgtttttaaactgttcaaaatatagcatcgatccatgagaaatacgtttagccgcctttaatagaggaaatcccaccgcctttctggatctcaccaacgacgatagttctgaccagcaacttatttcttcatcatccacctgttttaacatataataggcaggagatagatatccgtcattgcaatattccttttcgtaggcacacaatctaatattgataaaatctccattctcttctctgcatttattatcttgtttcggtggctgattaggctgtagtcttggtttaggctttggtatatcgttgttgaatctattttggtcattaaatctttcatttcttcctggtatatttctatcacctcgtttggttggatttttgtctatattatcgtttgtaacatcggtacgggtattcatttatcacaaaaaaaacttctctaaatgagtctactgctagaaaacctcatcgaagaagataccatattttttgcaggaagtatatctgagtatgatgatttacaaatggttattgccggcgcaaaatccaaatttccaagatctatgctttctatttttaatatagtacctagaacgatgtcaaaatatgagttggagttgattcataacgagaatatcacaggggcaatgtttaccacaatgtataatataagaaacaatttgggtctaggagatgataaactaactattgaagccattgaaaactatttcttggatcctaacaatgaggttatgcctcttatcattaataatacggatatgactgccgtcattcctaaaaaaagtggtaggagaaagaataagaacatggttattttccgtcaaggatcatcacctatcttgtgtattttcgaaactcgtaaaaagattaatatttataaagaaaatatggaatccgcgtcgactgagtatacacctatcggagacaacaaggctttgatatctaaatatgcgggaattaatgtcctgaatgtgtattctccttccacatccatgagattgaatgccatttacggattcaccaataaaaataaactagagaaacttagtactaataaggaactagaatcgtatagttctagccctcttcaagaacccattaggttaaatgattttctgggactattggaatgtgttaaaaagaatattcctctaacagatattccgacaaaggattgattactataaatggagaatgttcctaatgtatactttaatcctgtgtttatagagcccacgtttaaacattctttattaagtgtttataaacacagattaatagttttatttgaagtattcattgtattcattctaatatatgtattttttagatctgaattaaatatgttcttcatgcctaaacgaaaaatacccgatcctattgatagattacgacgtgctaatctagcgtgtgaagacgataaattaatgatctatggattaccatggatgacaactcaaacatctgcgttatcaataaatagtaaaccgatagtgtataaagattgtgcaaagcttttgcgatcaataaatggatcacaaccagtatctcttaacgatgttcttcgcagatgatgattcattttttaagtatttggctagtcaagatgatgaatcttcattatctgatatattgcaaatcactcaatatctagactttctgttattattattgatccaatcaaaaaataaattagaagccgtgggtcattgttatgaatctctttcagaggaatacagacaattgacaaaattcacagactttcaagattttaaaaaactgtttaacaaggtccctattgttacagatggaagggtcaaacttaataaaggatatttgttcgactttgtgattagtttgatgcgattcaaaaaagaatcctctctagctaccaccgcaatagatcctattagatacatagatcctcgtcgcgatatcgcattttctaacgtgatggatatattaaagtcgaataaagtgaacaataattaattctttattgtcatcatgaacggcggacatattcagttgataatcggccccatgttttcaggtaaaagtacagaattaattagacgagttagacgttatcaaatagctcaatataaatgcgtgactataaaatattctaacgataatagatacggaacgggactatggacgcatgataagaataattttgaagcattggaagcaactaaactatgtgatgtcttggaatcaattacagatttctccgtgataggtatcgatgaaggacagttctttccagacattgttgaattctgtgagcgtatggcaaacgaaggaaaaatagttatagtagccgcactcgatgggacatttcaacgtaaaccgtttaataatattttgaatcttattccattatctgaaatggtggtaaaactaactgctgtgtgtatgaaatgctttaaggaggcttccttttctaaacgattgggtgaggaaaccgagatagagataataggaggtaatgatatgtatcaatcggtgtgtagaaagtgttacgtcggctcataatattatattttttatctaaaaaactaaaaataaacattgattaaattttaatataatacttaaaaatggatgttgtgtcgttagataaaccgtttatgtattttgaggaaattgataatgagttagattacgaaccagaaagtgcaaatgaggtcgcaaaaaaactgccgtatcaaggacagttaaaactattactaggagaattattttttcttagtaagttacagcgacacggtatattagatggtgccaccgtagtgtatataggatctgctcccggtacacatatacgttatttgagagatcatttctataatttaggagtgatcatcaaatggatgctaattgacggccgccatcatgatcctattttaaatggattgcgtgatgtgactctagtgactcggttcgttgatgaggaatatctacgatccatcaaaaaacaactgcatccttctaagattattttaatttctgatgtgagatccaaacgaggaggaaatgaacctagtacggcggatttactaagtaattacgctctacaaaatgtcatgattagtattttaaaccccgtggcgtctagtcttaaatggagatgcccgtttccagatcaatggatcaaggacttttatatcccacacggtaataaaatgttacaaccttttgctccttcatattcagctgaaatgagattattaagtatttataccggtgagaacatgagactgactcgagttaccaaatcagacgctgtaaattatgaaaaaaagatgtactaccttaataagatcgtccgtaacaaagtagttgttaactttgattatcctaatcaggaatatgactattttcacatgtactttatgctgaggaccgtgtactgcaataaaacatttcctactactaaagcaaaggtactatttctacaacaatctatatttcgtttcttaaatattccaacaacatcaactgaaaaagttagtcatgaaccaatacaacgtaaaatatctagcaaaaattctatgtctaaaaacagaaatagcaagagatccgtacgcagtaataaatagaaacgtactactgagatatactaccgatatagagtataatgatttagttactttaataaccgttagacataaaattgattctatgaaaactgtgtttcaggtatttaacgaatcatccataaattatactccggttgatgatgattatggagaaccaatcattataacatcgtatcttcaaaaaggtcataacaagtttcctgtaaattttctatacatagatgtggtaatatctgacttatttcctagctttgttagactagatactacagaaactaatatagttaatagtgtactacaaacaggcgatggtaaaaagactcttcgtcttcccaaaatgttagagacggaaatagttgtcaagattctctaccgtcctaatataccattaaaaattgttagatttttccgcaataacatggtaactggagtagagatagccgatagatctgttatttcagtcgctgattaatcaattagtagagatgagataagaacattataataatcaataatatattttatatcttatatcttgtttagaaaaatgctaatattaaaatagctaacgctagtaatccaatcggaagccatttgatatctataatagggtatctaatttcctgattcagatagcggacagctatattctcggtagctactcgtttggaatcacaaacattatttacatctaatttactatctgtaatggaaacgtttcccaatgaaatggtacaatccgatacattgcattttgttatatttttttttaaagaggctggtaacaacgcatcgcttcgtttacatggctcgtaccaacaataatagggtaatcttgtatctattcctatccgtactatgcttttatcaggataaatacatttacatcgtatatcgtctttgttagcatcacagaatgcataaatttgttcgtccgtcatgataaaaatttaaagtgtaaatataactattattttatagttgtaataaaaagggaaatttgattgtatactttcggttctttaaaagaaactgacttgataaaaatggctgtaatctctaaggttacgtatagtctatatgatcaaaaagagattaatgctacagatattatcattagtcatgttaaaaatgacgacgatatcggtaccgttaaagatggtagactaggtgctatggatggggcattatgtaaaacttgtgggaaaacggaattggaatgtttcggtcactggggtaaagtaagtatttataaaactcatatagttaagcctgaatttatttcagaaattattcgtttactgaattatatatgtattcactgcggattattgcgttcacgagaaccgtattccgacgatattaacctaaaagagttatcgggacacgctcttaggagattaaaggataaaatattatccaagaaaaagtcatgttggaacagtgaatgtatgcaaccgtatcaaaaaattactttttcaaagaaaaaggtttgtttcgtcaacaagttggatgatattaacgttcctaattctctcatctatcaaaagttaatttctattcatgaaaagttttggccattattagaaattcatcaatatccagctaacttattttatacagactactttcccatccctccgttgattattagaccggctattagtttttggatagatagtatacccaaagaaaccaatgaattaacttacttattaggtatgatcgttaagaattgtaacttgaatgctgatgaacaggttatccagaaggcggtaatagaatacgatgatattaaaattatttctaataacacttccagtatcaatttatcatatatcacatccggcaaaaataatatgattagaagttatatcgtcgcccggcgaaaagatcagaccgctagatctgtaattggtcccagtacatctatcaccgttaatgaggtaggaatgcccgcatatattagaaatacacttacagaaaagatatttgttaatgcctttacagtggataaagttaaacaactattagcgtcaaaccaagttaaattttactttaataaacgattaaaccaattaacaagaatacgccaaggaaagtttatcaaaaataaaatacatttattgcctggtgattgggtagaagtagctgttcaagaatatacaagtattatttttggaagacagccgtctctacatagatacaacgtcatcgcttcatctatcagagctaccgaaggagatactatcaaaatatctcccggaattgtcaactctcaaaatgctgatttcgacggagatgaagaatggatgatattggagcaaaatcctaaagccgtaattgaacaaagtattcttatgtatccgacgacgttactcaaacacgatattcatggagcccccgtttatggatctattcaagatgaaatcgtagcagcgtattcattgtttaggatacaagatctttgtttagatgaagtattgaacatcttggggaaatatggaagagagttcgatcctaaaggtaaatgtaaattcagcggtaaagatatctatacttacttgataggtgaaaagattaattatccgggtctcttaaaggatggtgaaattattgcaaacgacgtagatagtaattttgttgtggctatgaggcatctgtcattggctggactcttatccgatcataagtcgaacgtggaaggtatcaactttattatcaagtcatcttatgtttttaagagatatctatctatttacggttttggggtgacattcaaagatctgagaccaaattcgacgttcactaataaattggaggccatcaacgtagaaaaaatagaacttatcaaagaagcatacgccaaatatctcaacgatgtaagagacgggaaaatagttccattatctaaagctttagaggcggactatgtggaatccatgttatccaacttgacaaatcttaatatccgagagatagaagaacatatgagacaaacgctgatagatgatccagataataacctcctgaaaatggccaaagcgggttataaagtaaatcccacagaactaatgtatattctaggtacttatggacaacagaggattgatggtgaaccagcagagactcgagtattgggtagagtcttaccttactatcttccagactctaaggatccagaaggaagaggttacattcttaattctttaacaaaaggattaacgggttctcaatattacttttcgatgctggttgcaagatctcaatctactgatatcgtctgtgaaacatcacgtaccggaacactggctagaaaaatcattaaaaagatggaggatatggtggtcgacggatacggacaagtagttataggtaatacgctcatcaagtacgccgccaattataccaaaattctaggctcagtatgtaaacctgtagatcttatctatccagatgagtccatgacttggtatttggaaattagtgctctgtggaataaaataaaacagggattcgtttactctcagaaacagaaacttgcaaaaaagacattggcgccgtttaatttcctagtattcgtcaaacccaccactgaggataatgctattaaggttaaggatctgtacgatatgattcataacgtcattgatgatgtgagagagaaatacttctttacggtatctaatatagattttatggagtatatattcttgacgcatcttaatccttctagaattagaattacaaaagaaacggctatcactatctttgaaaagttctatgaaaaactcaattatactctaggtggtggaactcctattggaattatttctgcacaggtattgtctgagaagtttacacaacaagccctgtccagttttcacactactgaaaaaagtggtgccgtcaaacaaaaacttggtttcaacgagtttaataacttgactaatttgagtaagaataagaccgaaattatcactctggtatccgatgatatctctaaacttcaatctgttaagattaatttcgaatttgtatgtttgggagaattaaatccaaacatcactcttcgaaaagaaacagataggtatgtagtagatataatagtcaatagattatacatcaagagagcagaaattaccgaattagtcgtcgaatatatgattgaacgattcatctcctttagcgtcattgtaaaggaatggggtatggaaacattcattgaggatgaggataatattagatttactgtctacctaaatttcgttgaaccggaagaattgaatcttagtaagtttatgatggttcttccgggtgccgccaacaagggcaagattagtaaattcaagattcctatctctgattatacgggatatgacgacttcaatcaaacaaaaaagctcaataagatgactgtagaactcatgaatctaaaagaattgggttctttcgatttggaaaacgtcaacgtgtatcctggagtatggaatacatacgatatcttcggtatcgaggccgctcgtgaatacttgtgcgaagccatgttaaacacctatggagaagggttcgattatctgtatcagccttgtgatcttctcgctagtttactatgtgctagttacgaaccagaatcagtgaataaattcaagttcggcgcagctagtactcttaagagagctacgttcggagacaataaagcattgttaaacgcggctcttcataaaaagtcagaacctattaacgataatagtagctgccacttttttagcaaggtccctaatataggaactggatattacaaatactttatcgacttgggtcttctcatgagaatggaaaggaaactatctgataagatatcttctcaaaagatcaaggaaatggaagaaacagaagacttttaattcttatcaataacatatttttctatgatctgtcttttaaacgatggattttccacaaatgcgcctctcaagtccctcatagaatgatacacgtataaaaaatatagcataggcaatgactccttatttttagacattagatatgccaaaatcatagccccgcttctatttactcccgcagcacaatgaaccaacacgggctcgtttcgttgatcacatttagataaaaaggcggttacgtcgtcaaaatatttactaatatcggtagttgtatcatctaccaacggtatatgaataatattaatattagagttaggtaatgtatatttatccatcgtcaaatttaaaacatatttgaacttaacttcagatgatggtgcatccatagcatttttataatttcccaaatacacattattggttactcttgtcattatagtgggagatttggctttgtgcatatctccagttgaacgtagtagtaagtatttatacaaacttttcttatccatttataacgtacaaatggataaaactactttatcggtaaacgcgtgtaatttagaatacgttagagaaaaggctatagtaggcgtacaagcagccaaaacatcaacacttatattctttgttattatattggcaattagtgcgctattactctggtttcagacgtctgataatccagtctttaatgaattaacgagatatatgcgaattaaaaatacggttaacgattggaaatcattaacggatagcaaaacaaaattagaaagtgatagaggtagacttctagccgctggtaaggatgatatattcgaattcaaatgtgtggatttcggcgcctattttatagctatgcgattggataagaaaacatatctgccgcaagctattaggcgaggtactggagacgcgtggatggttaaaaaggcggcaaaggtcgatccatctgctcaacaattttgtcagtatttgataaaacacaagtctaataatgttattacttgtggtaatgagatgttaaatgaattaggttatagcggttattttatgtcaccgcattggtgttccgattttagtaatatggaatagtgttagataaatgcggtaacgaatgttcctgtaaggaaccataacagcttagatttaacgttaaagatgagcataaacataataaacaaaattacaatcaaacctataacattaatatcaaacaatccaaaaaatgaaatcagtggagtagtaaacgcgtacataactcctggataacgtttagcagctgccgttcctattctagaccaaaaattcggtttcatgttttcgaaacggtattctgcaacaagtcgaggatcgtgttctacatatttggcggcgttatccagtatctgcctattgatcttcatttcgttttcgattctggctatttcaaaataaaatcccgatgatagacctccagactttataatttcatctacgatgttcagcgccgtagtaactctaataatataggctgataagctaacatcataccctcctgtatatgtgaatatggcatgatttttgtccattacaagctcggttttaactttattgcctgtaataatttctctcatctgtaggatatctatttttttgtcatgcattgccttcaagacgggacgaagaaacgtaatatcctcaataacgttatcgttttctacaataactacatattctacctttttattttctaactcggtaaaaaaattagaatcccatagggctaaatgtctagcgatatttcttttcgtttcctctgtacacatagtgttacaaaaccctgaaaagaagtgagtatacttgtcatcatttctaatgtttcctccagtccactgtataaacgcataatccttgtaatgatctggatcatccttgactaccacaacatttcttttttctggcataacttcattgtcctttacatcatcgaacttctgatcattaatatgctcatgaacattaggaaatgtttctgatggaggtctatcaataactggcacaacaataacaggagttttcaccgccgccatttagttattgaaattaatcatatacaactctttaatacgagttatattttcgtctatccattgtttcacatttacatatttcgacaaaaagatataaaatgcgtattccaatgcttctctgtttaatgaattactaaaatatacaaacacgtcactgtctggcaataaatgatatcttagaatattgtaacaatttattttgtattgcacatgttcgtgatctatgagttcttcttcgaatggcataggatctccgaatctgaaaacgtataaataggagttagaataataatatttgagagtattggtaatatataaactctttagcggtataattagtttttttctctcgatttctatttttagatgtgatggaaaaatgactaattttgtagcattagtatcatgaactctaatcgagatcttaatatcttcgtcacacgttagttctttgaagtttttaagagatgcatcagttggttcgaccgatggagtaggtgcaacaattttttgttcgatgtatgtatgtactggagccattgtcttaactataatggtgcttgtatcgaaaaactttaatgcagataatggaagctcttcgccgcgactttctacatcgtaattgggttctaacgccgatctctgaatggatactagttttctaagttctaatgtgattctctgaaaatgtaaatccaattcctccggcattatagatgtgtatacatcggtaaataaaactatagtatccaacgatcccttctcgcaaattctagtcttaaccaaaaaatcgtatataaccacggagatggcgtatttaagagtggattcttctaccgttttgttcttggatttcatataagaaactataaagtccgcactactgttaagaatgattactaacgcaactatatagtttaaattaagcatcttggaaacataaaataactctgtagacgatacttgactttcgaataagtttgcagacaaacgaagaaagaacagacctctcttaatttcagaagaaaactttttttcgtattcctgacgtctagagtttatatcaataagaaagttaagaattagtcggttaatgttgtatttcattacccaagtttgagatttcataatattatcaaaagacatgataatattaaagataaagcgctgactatgaacgaaatagctatatggttcgctcaagaatatagtcttgttaaacgtggaaacgataactgtatttttaatcacgtcagcggcatctaaattaaatataggtatatttattccacacactctacaatatgccacaccatcttcataataaataaattcgttagcaaaattattaattttagtgaaatagttagcgtcaactttcatagcttccttcaatctaatttgatgctcacacggtgcgaattccactctaacatcccttttccatgcctcaggttcatcgatctctataatatctagttttttgcgtttcacaaacacaggctcgtctctcgcgatgagatctgtatagtaactatgtaaatgataactagatagaaagatgtagctatatagatgacgatcctttaagagaggtatgatgactttaccccaatcagatagactgttgttatggtcttcggaaaaagaatttttataaatttttccagtattttccaaatatacgtacttaacatctaaaaaatccttaatgataataggaatggataatccgtctattttataaagaaatacatatcgcacattatacttttttttggaaatgggaataccgatgtgtctacataaatatgcaaagtctaaatattttttagagaatcttagttggtccaaattcttttccaagtacggtaatagatttttcatattgaacggtatcttcttaatctctggttctagttccgcattaaatgatgaaactaagtcactatttttataactaacgattacatcacctctaacatcatcatttaccagaatactgatcttcttttgtcgtaaatacatgtctaatgtgttaaaaaaaagatcatacaagttatacgtcatttcatctgtggtattcttgtcattgaaggataaactcgtactaatctcttctttaacagcctgttcaaatttatatcctatatacgaaaaaatagcaaccagtgtttgatcatccgcgtcaatattctgttctatcgtagtgtataacaatcgtatatcttcttctgtgatagtcgatacgttataaaggttgataacgaaaatatttttatttcgtgagataaagtcatcgtaggattttggacttatattcgcgtctagtagatatgcttttatttttggaatgatctcaattagaatagtctctttagagtccatttaaagttacaaacaactaggaaattggtttatgatgtataatttttttagtttttatagattctttattctatacttaaaaaatgaaaataaatacaaaggttcttgagggttgtgttaaattgaaagcgagaaataatcataaattatttcattatcgcgatatccgttaagtttgtatcgtaatggcgtggtcaattacaaataaagcggatactagtagcttcacaaagatggctgaaatcagagctcatctaaaaaatagcgctgaaaataaagataaaaacgaggatattttcccggaagatgtaataattccatctactaagcccaaaaccaaacgagccactactcctcgtaaaccagcggctactaaaagatcaaccaaaaaggaggaagtggaagaagaagtagttatagaggaatatcatcaaacaactgaaaaaaattctccatctcctggagtcagcgacattgtagaaagcgtggctgctgtagagctcgatgatagcgacggggatgatgaacctatggtacaagttgaagctggtaaagtaaatcatagtgctagaagcgatctttctgacctaaaggtggctaccgacaatatcgttaaagatcttaagaaaattattactagaatctctgcagtatcgacggttctagaggatgttcaagcagctggtatctctagacaatttacttctatgactaaagctattacaacactatctgatctagtcaccgagggaaaatctaaagttgttcgtaaaaaagttaaaacttgtaagaagtaaatgcgtgcacttttttataaagatggtaaactctttaccgataataattttttaaatcctgtatcagacgataatccagcgtatgaggttttgcaacatgttaaaattcctactcatttaacagatgtagtagtatatgaacaaacgtgggaggaggcgttaactagattaatttttgtgggaagtgattcaaaaggacgtagacaatacttttacggaaaaatgcatgtacagaatcgcaacgctaaaagagatcgtatttttgttagagtatataacgttatgaaacgaattaattgttttataaacaaaaatataaagaaatcgtccacagattccaattatcagttggcggtttttatgttaatggaaactatgttttttattagatttggtaaaatgaaatatcttaaggagaatgaaacagtagggttattaacactaaaaaataaacacatagaaataagtcccgatgaaatagttatcaagtttgtaggaaaggacaaagtttcacatgaatttgttgttcataagtctaatagactatataaaccgctattgaaactgacggatgattctagtcccgaagaatttctgttcaacaaactaagtgaacgaaaggtatacgaatgtatcaaacagtttggtattagaatcaaggatctccgaacgtatggagtcaattatacgtttttatataatttttggacaaatgtaaagtccatatctcctcttccgtcaccaaaaaagttaatagcgttaactatcaaacaaactgctgaagtggtaggtcatactccatcaatttcaaaaagagcttatatggcaacgactattttagaaatggtaaaggataaaaattttttagatgtagtatctaaaactacgttcgatgaattcctatctatagtcgtagatcacgttaaatcatctacggatggatgatatagatctttacacaaataattacaagaccgataaatggaaatggataagcgtatgaaatctctcgcaatgacagctttcttcggagagctaaacacattagatattatggcattgataatgtctatatttaaacgccatccaaacaataccattttttcagtggataaggatggtcagtttatgattgatttcgaatacgataattataaggcttctcaatatttggatctgaccctcactccgatatctggagatgaatgcaagactcacgcatcgagtatagccgaacaattggcgtgtgtggatattattaaagaggatattagcgaatatatcaaaactactccccgtcttaaacgatttataaaaaaataccgcaatagatcagatactcgtatcagtcgagatacagaaaagcttaaaatagctctagctaaaggcatagattacgaatatataaaagacgcttgttaataagtaaatgaaaaaaaactagtcgtttataataaaacacaatatggatgccaacatagtatcatcttctactattgcaacgtatatagacgctttagcgaagaatgcttcagaattagaacagaggtctaccgcatacgaaataaataatgaattggaactagtatttattaagccgccattaattactttgacaaatgtagtgaatatctctacgattcaggaatcgtttattcgatttaccgttactaataaggaaggtgttaaaattagaactaagattccattatctaaggtacatggtctagatgtaaaaaatgtacagttagtagatgctatagataacatagtttgggaaaagaaatcattagtgacggaaaatcgtcttcacaaagaatgcttgttgagactatcgacagaggaacgtcatatatttttggattacaagaaatatggatcctctatccgactagaattagtcaatcttattcaagcaaaaacaaaaaactttacgatagactttaagctaaaatattttctaggatccggtgcccagtctaaaagttctttattacacgctattaatcatccaaagtcaaggcctaatacatctctggaaatagaattcacacctagagacaatgaaaaagttccatatgatgaactaataaaggaattgacgactctatcacgtcatatatttatggcttctccagagaatgtaattctttctccgcctattaacgcgcctataaaaacctttatgttgcctaaacaagatatagtaggtttggatctggaaaatctatatgccgtaactaagactgacggaattcctataactatcagagttacatcaaaagggttgtattgttattttacacatcttggttatattattagatatcctgttaagagaataatagattccgaagtagtagtctttggtgaggcagttaaggataagaactggaccgtatatctcattaagctaatagagcctgtgaatgcaatcaatgatagactagaagaaagtaagtatgttgaatctaaactagtggatatttgtgatcggatagtattcaagtcaaagaaatacgaaggtccgtttactacaactagtgaagtcgtcgatatgttatctacatatttaccaaagcaaccagaaggtgttattctgttctattcaaagggacctaaatctaacattgattttaaaattaaaaaggaaaatactatagaccaaactgcaaatgtagtatttaggtacatgtccagtgaaccaattatctttggagaatcgtctatctttgtagagtataagaaatttagcaacgataaaggctttcctaaagaatatggttctggtaagattgtgttatataacggcgttaattatctaaataatatctattgtttggaatatattaatacacataatgaagtgggtattaagtccgtggttgtacctattaagtttatagcagaattcttagttaatggagaaatacttaaacctagaattgataaaaccatgaaatatattaactcagaagattattatggaaatcaacataatatcatagtcgaacatttaagagatcaaagcatcaaaataggagatatctttaacgaggataaactatcggatgtgggacatcaatacgccaataatgataaatttagattaaatccagaagttagttattttacgaataaacgaactagaggaccgttgggaattttatcaaactacgtcaagactcttcttatttctatgtattgttccaaaacatttttagacgattccaacaaacgaaaggtattggcgattgattttggaaacggtgcggacctggaaaaatacttttatggagagattgcgttattggtagcgacggatccggatgctgatgctatagctagaggaaatgaaagatacaacaaattaaactctggaattaaaaccaagtactacaaatttgactacattcaggaaactattcgatccgatacatttgtctctagtgtcagagaagtattctattttggaaagtttaatatcatcgactggcagtttgctatccattattcttttcatccgagacattatgctaccgtcatgaataacttatccgaactaactgcttctggaggcaaggtattaatcactaccatggacggagacaaattatcaaaattaacagataaaaagacttttataattcataagaatttacctagtagcgaaaactatatgtctgtagaaaaaatagctgatgatagaatagtggtatataatccatcaacaatgtctactccaatgactgaatacattatcaaaaagaacgatatagtcagagtgtttaacgaatacggatttgttcttgtagataacgttgatttcgctacaattatagaacgaagtaaaaagtttattaatggcgcatctacaatggaagatagaccgtctacaaaaaactttttcgaactaaatagaggagccattaaatgtgaaggtttagatgtcgaagacttacttagttactatgttgtttatgtcttttctaagcggtaaataataatatggtatgggttctgatatccccgttctaaatgcattaaataattccaatagagcgatttttgttcctataggaccttccaactgtggatactctgtattgttaatagatatattaatacttttgtcgggtaacagaggttctacgtcttctaaaaataaaagtttgataacatctggcctgttcataaataaaaacttggcgattctatatatactcttattatcaaatctagccattgtcttatagatgtgagctactgtaggtgtaccatttgattttctttctaatactatatatttctctcgaagaagttcttgcacatcatctgggaataaaatactactgttgagtaaatcagttattttttttatatcgatattgatggacatttttatagttaaggataataagtatcccaaagtcgataacgacgataacgaagtatttatacttttaggaaatcacaatgactttatcagatcaaaattaacaaaattaaaggagcatgtatttttttctgaatatattgtgactccagatacatatggatctttatgcgtcgaattaaatgggtctagttttcagcacggtggtagatatatagaggtggaggaatttatagatgctggaagacaagttagatggtgttctacatccaatcatatatctgaagatatgcacactgataaatttgtcatttatgatatttatacgtttgattcgttcaagaataaacgattggtatttgtacaggtgcctccatcattaggagatgatagctatttgactaatccgttattgtctccgtattatcgtaattcagtagccagacaaatggtcaatgatatgatttttaatcaagattcatttttaaaatatttattagaacatctgattagaagccactatagagtttctaaacatataacaatagttagatacaaggataccgaagaattaaatctaacgagaatatgttataatagagataagtttaaggcgtttgtattcgcttggtttaacggcgtttcggaaaatgaaaaggtactagatacgtataaaaaggtatctaatttgatataatgaattcagtgactgtatcacacgcgccatatactattacttatcacgatgattgggaaccagtaatgagtcaattggtagagttttataacgaagtagccagttggctgctacgagacgagacgtcgcctattcctgataagttctttatacagttgaaacaaccgcttagaaataaacgagtatgtgtgtgtggtatagatccgtatccgaaagatggaactggtgtaccgttcgaatcaccaaattttacaaaaaaatcaattaaggagatagcttcatctatatctagattaaccggagtaattgattataaaggttataaccttaatataatagacggggttataccctggaattattacttaagttgtaaattaggagaaacaaaaagtcacgcgatctactgggataagatttccaagttactgctgcagcatataactaaacacgttagtgttctttattgtttgggtaaaacagatttctcgaatatacgggcaaagttagaatccccggtaactaccatagtcggatatcatccagcggctagagaccgccaattcgagaaagatagatcatttgaaattatcaacgttttactggaattagacaacaaggcacctataaattgggctcaagggtttatttattaatgctttagtgaaattttaacttgtgttctaaatggatgcaactattagaggtaatgatgttatctttgttcttaagactataggtgtcccgtcagcgtgcagacaaaatgaagatccaagatttgtagaagcatttaaatgcgacgagttagaaagatatattgagaataatccagaatgtacactattcgaaagtcttagggatgaggaagcatactctatagtcagaattttcatggatgtagatttagacgcgtgtctagacgaaatagattatttaacggctattcaagattttattatcgaggtgtcaaactgtgtagctagattcgcgtttacagaatgcggtgccattcatgaaaatgtaataaaatccatgagatctaatttttcattgactaagtctacaaatagagataaaacaagttttcatattatctttttagacacgtataccactatggatacattgatagctatgaaacgaacactattagaattaagtagatcatctgaaaatccactaaccagatcgatagacactgccgtatataggagaaaaacaactcttcgggttgtaggtactaggaaaaatccaaattgcgacactattcatgtaatgcaaccaccgcatgataatatagaagattacctattcacttacgtggatatgaacaacaatagttattacttttctctacaacgacgattggaggatttagttcctgataagttatgggaaccagggtttatttcattcgaagacgctataaaaagagtttcaaaaatattcattaattctataataaactttaatgatctcgatgaaaataattttacaacggtaccactggtcatagattacgtaacaccttgtgcattatgtaaaaaacgatcgcataaacatccgcatcaactatcgttggaaaatggtgctattagaatttacaaaactggtaatccacatagttgtaaagttaaaattgttccgttggatggtaataaactgtttaatattgcacaaagaattttagacactaactctgttttattaaccgaacgaggagaccatatagtttggattaataattcatggaaatttaacagcgaagaacccttgataacaaaactaattctgtcaataagacatcaactacctaaggaatattcaagcgaattactctgtccgaggaaacgaaagactgtagaagctaacatacgagacatgttaatagattcagtggagaccgatacctatccggataaacttccgtttaaaaatggtgtattggacctggtagacggaatgttttactctggagatgatgctaaaaaatatacgtgtactgtatcaaccggatttaaatttgacgatacaaagttcgtcgaagacagtccagaaatggaagagttaatgaatatcattaacgatatccaaccattaacggatgaaaataagaaaaatagagagttgtacgaaaaaactttatctagttgtttatgcggtgctaccaaaggatgtttaacattcttttttggagaaactgcaactggaaagtcgacaaccaaacgtttgttaaagtctgctatcggtgacctgtttgttgagacgggtcaaacaattttaacagatgtattggataaaggacctaatccatttatcgctaacatgcatttgaaaagatctgtattctgtagcgaactacctgattttgcctgtagtggatcaaagaaaattagatctgacaatattaaaaagttgacagaaccttgtgtcattggaagaccgtgtttctccaataaaattaataatagaaaccatgcgacaatcattatcgatactaattacaaacctgtctttgataggatagataacgcattaatgagaagaattgccgtcgtgcgattcagaacacacttttctcaaccttctggtagagaggctgctgaaaataatgacgcgtacgataaagtcaaactattagacgaggggttagatggtaaaatacaaaataatagatatagattcgcatttctatacttgttggtgaaatggtacaaaaaatatcatgttcctattatgaaactatatcctacaccggaagagattccggactttgcattctatctcaaaataggtactctgttagtatctagctctgtaaagcatattccattaatgacggacctctccaaaaagggatatatattgtacgataatgtggttactcttccgttgactactttccaacagaaaatatccaagtattttaattctagactatttggacacgatatagagagcttcatcaatagacataagaaatttgccaatgttagtgatgaatatctgcaatatatattcatagaggatatttcatctccgtaaatatatgctcatatatttatagaagatatcacatatctaaatgaataccggaatcatagatttatttgataatcatgttgatagtataccaactatattacctcatcagttagctactctagattatctagttagaactatcatagatgagaacagaagcgtgttattgttccatattatgggatcaggtaaaacaataatcgctttgttgttcgccttggtagcttccagatttaaaaaggtttacattctagtgcctaatattaacattttgaaaatttttaattataatatgggtgtagctatgaacttgtttaatgacgaattcatagctgagaatatctttattcattccacaacaagtttttattctcttaattataacgataacgtcattaattataacggattatctcgctacaataactctatttttatcgttgatgaggcacataatatctttgggaataatactggagaacttatgaccgtgataaaaaataaaaacaagattccttttttactattgtctggatctcccattactaacacacctaatactctgggtcatattatagatttaatgtccgaagagacgatagattttggtgaaattattagtcgtggtaagaaagtaattcagacacttcttaacgaacgaggtgtgaatgtacttaaggatttgcttaaaggaagaatatcatattacgaaatgcctgataaagatctaccaacgataagatatcacggacgtaagtttctagatactagagtagtatattgtcacatgtctaaacttcaagagagagattatatgattactagacgacagctatgttatcatgaaatgtttgataaaaatatgtataacgtgtcaatggcagtattgggacaacttaatctgatgaataatttagatactttatttcaggaacaggataaggaattgtacccaaatctgaaaataaataatggcgtgttatacggagaagaattggtaacgttaaacattagttccaaatttaaatactttattaatcggatacagacactcaacggaaaacattttatatacttttctaattctacatatggcggattggtaattaaatatatcatgctcagtaatggatattctgaatataatggttctcagggaactaatccacatatgataaacggcaaaccaaaaacatttgctatcgttactagtaaaatgaaatcgtctttagaggatctattagatgtgtataattctcctgaaaacgatgatggcagtcaattgatgtttttgttttcgtcaaacattatgtccgaatcctatactctgaaagaggtaaggcatatttggtttatgactatcccagatactttttctcaatacaaccaaattcttggacgatctattagaaaattctcttacgccgatatttctgaaccagttaatgtatatcttttagccgccgtatattccgatttcaatgacgaagtgacgtcattaaacgattacacacaggatgaattaattaatgttttaccatttgacatcaaaaagctgttgtatctaaaatttaagactaaagaaacgaatagaatatactctattcttcaagagatgtctgaaacgtattctcttccaccacatccatcaattgtaaaagttttattgggagaattggtcagacaatttttttataataattctcgtattaagtataacgataccaagttacttaaaatggttacatcagttataaaaaataaagaagacgctaggaattacatagatgatattgtaaacggtcacttctttgtatcgaataaagtatttgataaatctcttttatacaaatacgaaaacgatattattacagtaccgtttagactttcctacgaaccatttgtttggggagttaactttcgtaaagaatataacgtggtatcttctccataaaactgatgagatatataaagaaataaatgtcgagctttgttaccaatggataccttccagttacattggagccacacgagctgacgttagacataaaaactaatattaggaatgccgtatataagacgtatctccatagagaaattagtggtaaaatggccaagaaaatagaaattcgtgaagacgtggaattacctctcggcgaaatagttaataattctgtagttataaacgttccgtgtgtaataacctacgcgtattatcacgttggggatatagtcagaggaacattaaacatcgaagatgaatcaaatgtaactattcaatgtggagatttaatctgtaaactaagtagagattcgggtactgtatcatttagcgattcaaagtactgcttttttcgaaatggtaatgcgtatgacaatggcagcgaagtcactgccgttctaatggaggctcaacaaggtatcgaatctagttttgtttttctcgcgaatatcgttgactcataaaaaagagaatagcggtaagtataaacacgaatactatggcaataattgcgaatgttttattcccttcgatatatttttgataatatgaaaaacatgtctctctcaaatcggacaaccatctcataaaatagttctcgcgcgctggagaggtagttgctgctcgtataatctccccagaataatatacttgcgtgtcgtcgttcaatttatacggatttctatagttctctgttatataatgcggttttccatcatgattagacgacgacaatagtgttctaaatttagatagttgatcagaatgaatgtttattggcgttggaaaaattatccatacagcgtctgcagagtggttgatagttgttcctagatatgtaaaataatccaacttactaggcagcaaattgtctagataaaatactgaatcaaacggtgcagacgtattggtggatctaatggaatccaattgattaactatcttttgaaaatatacatttttatgatccgatacttgtaagaatatagaaataatgataagtccatcatcgtgtttttttgcctcttcataagaactatattttttcttattccaatgaacaagattaatctctccagagtatttgtacacatctatcaagtgattggatccataatcgtcttcctttccccaatatatacgtagtgatgataacacatattcattggggagaaaccctccacttatatatcctcctttaaaattaatccttactagttttccagtgttctggatagtggttggtttcgactcattataatgtatgtctaacggcttcaatcgcgcgttagaaattgcttttttagtttctatattaataggagatagttgttgcggcatagtaaaaatgaaatgataactgtttaaaaatagctcttagtatgggaattacaatggatgaggaagtgatatttgaaactcctagagaattaatatctattaaacgaataaaagatattccaagatcaaaagacacgcatgtgtttgctgcgtgtataacaagtgacggatatccgttaataggagctagaagaacttcattcgcattccaagcgatattatctcaacaaaattcagattctatctttagagtatccactaaactattacggtttatgtactacaatgaactaagagaaatctttagacggttgagaaaaggttctatcaacgatatcgatcctcactttgaagagttaatattattgggtggtaaactagataaaaaggaatctattaaagattgtttaagaagagaattaaaagaggaaagtgatgaacgtataacagtaaaagaatttggaaatgtaattctaaaacttacaacacgggataaattatttaataaagtatatataagttattgcatggcgtgttttattaatcaatcgttggaggatttatcgcatactagtatttacaatgtagaaattagaaagattaaatcattaaatgattgtattaacgacgataaatacgaatatctgtcttatatttataatatgctagttaatagtaaatgaacttttacagatctagtataattagtcagattattaagtataatagacgactagctaagtctattatttgcgaggatgactctcaaattattacactcacggcattcgttaaccaatgcctatggtgtcataaacgagtatccgtgtccgctattttattaactactgataacaaaatattagtatgtaacagacgagatagttttctctattctgaaataattagaactagaaacatgtctagaaagaaacgattatttctgaattattccaattatttgtccaaacaggaaagaagtatactatcgtcatttttttctctagatccagctactactgataatgatagaatagatgctatttatccgggtggcatacccaaaaggggtgagaatgttccagagtgtttatccagggaaattaaagaagaagttaatatagacaattcttttgtattcatagacactcggttttttattcatggcatcatagaagataccattattaataaattttttgaggtaatcttctttgtcggaagaatatctttaacgagtgatcaaatcattgatacatttaaaagtaatcatgaaatcaaggatctaatatttttagatccgaattcaggtaatggactccaatacgaaattgcaaaatatgctctagatactgcaaaactcaaatgttatggccatagaggatgttattacgaatcattaaaaaaattaactgaggatgattgattagaaaatataaattaatttaccatcgtgtatttttataacgggattgtccggcatatcatgtagatagttaccgtctacatcgtatactcgaccatctacgcctttaaatcctctatttattgacattaatctattagaattggaataccaaatattagtaccctcaattagtttattggtaatattttttttagacgatagatcgatggctcttgaaaccaaggttttccaaccggactcattgtcgatcggtgagaagtctttttcattagcatgaatccattctaatgatgtatgtttaaacactctaaacaattggacaaattcttttgatttgctttgaatgatttcaaataggtcttcgtctacagtaggcataccattagataatctagccattataaagtgcacgtttacatatctacgttctggaggagtaagaacgtgactattgagacgaatggctcttcctactatctgacgaagagacgcctcgttccatgtcatatctaaaatgaagatatcattaattgagaaaaaactaataccctcgcctccactagaagagaatacgcatgttttaatgcattctccgttagtgtttgattcttggttaaactcagccaccgccttgattctagtatcttttgttctagatgagaactctatattagagataccaaagactttgaaatatagtaataagatttctattcctgactgattaacaaatggttcaaagactagacatttaccatgggatgctaatattcccaaacatacatctataaatttgacgcttttctcttttaattcagtaaatagagagatatcagccgcactagcatcccctttcaatagttctccctttttaaaggtatctaatgcggatttagaaaactctctatctcttaatgaatttttaaaatcattatatagtgttgctatctcttgcgcgtattcgcccggatcacgattttgtctttcaggaaagctatcgaacgtaaacgtagtagccatacgtctcagaattctaaatgatgatatacctgtttttatttcagcgagtttagccttttgataaatttcttcttgctttttcgacatattaacgtatcgcattaatactgttttcttagcgaatgatgcagacccttctacgtcatcaaaaatagaaaactcgttattaactatgtacgaacataggcctcctagtttggagactaattctttctcatcaactagacgtttattctcaaatagcgattggtgttgtaaggatcctggtcgtagtaagttaaccaacatggtgaattcttgcacactattaacgataggtgtagccgataaacaaatcatcttatggttttttaatgcgatggtcttagataaaaaattatatactgaacgagtaggacggatcttaccatcttctttgattaatgatttagaaatgaagttatgacattcatcaataatgacgcatattctactcttggaattaatagttttgatattagtaaaaaatttatttctaaaattttgatcatcgtaattaataaaaatacaatccttcgttatctctggagcgtatctgagtatagtgttcatccaaggatcttctatcaaagcctttttcaccaataagataatagcccaattcgtataaatatccttaagatgtttgagaatatatacagtagtcattgttttaccaacacccgtttcatggaacaataaaagagaatgcatactgtctaatcctaagaaaactcttgctacaaaatgttgataatccttgaggcgtactacgtctgttcccatcatttcaacaggcatattagtagttctgcgcaatgcataatcgatataggccgcgtgtgatttactcatttatgagtgataagtaataactatgttttaaaaatcacagcagtagtttaactagtcttctctgatgtttgttttcgatactttttgaatcagaagtcatactagaataaagcaacgagtgaacgtaatagagagcttcgtatactctattcgaaaactctaagaacttattaatgaattccgtatccactggattgtttaaaatactaaattgaacactgttcacatccttccaagaagaagacttagtgacggacttaacatgagacataaataaatccaaattttttttacaaacatcactagccaccataatggcgctatctttcaaccagctatcgcttacgcattttagcagtctaacatttttaaagagactacaatatattctcatagtatcgattacacctctaccgaataaagttggaagtttaataatacaatatttttcgtttacaaaatcaaataatggtcgaaacacgtcgaaggttaacatcttataatcgctaatgtatagattgttttcagtgagatgattattagatttaatagcatctcgttcacgtttgaacagtttattgtgtgcgctgaggtcggcaactacggcgtccgctttagtactcctcccataatactttacgctattaatctttaaaatttcatagactttatctagatcgctttctggtaacatgatatcatgtgtaaaaagttttaacatgtcggtcggcattctatttagatcattaactctagaaatctgaagaaagtaattagctccgtattccagactaggtaatgggcttttacctaaagacaagttaagttctggcaatgtttcataaaatggaagaaggacatgcgttccctcccggatattttttacaatttcatccatttacaactctatagtttgttttcattattattagttattatctcccataatcttggtaatacttaccccttgatcgtaagataccttatacaggtcattacatacaactaccaattgtttttgtacataatagattggatggttgacatccatggtggaataaactactcgaacagatagtttatctttccccctagatacattggccgtaatagttgtcggcctaaagaatatctttggtgtaaagttaaaagttagggttcttgttccattattgctttttgtcagtagttcattataaattctcgagatgggtccgttctctgaatatagaacatcatttccaaatctaacttctagtctagaaataatatcggtcttattcttaaaatctattcccttgatgaagggatcgttaatgaacaaatccttggcctttgattcggctgatctattatctccgttatagacgttacgttgactagtccaaagacttacaggaatagatgtatcgatgatgttgatactatgtgatatgtgagcaaagattgttctcttagtggcatcactatatgttccagtaatggcggaaaactttttagaaatgttatatataaaagaattttttcgtgttccaaacattagcagattagtatgaagataaacactcatattatcaggaacattatcaatttttacatacacatcagcatcttgaatagaaacgataccatcttctggaacctcaacaatctcggcagactccggataaccagtcggtgggccatcactaacaataactagatcatccaacaatctactcacatatgcatctatataatctttttcatcttgtgagtaccctggatacgaaataaatttattatccgtatttccataataaggtttagtataaacagagagcgatgttgccgcatgaacttcagttacagtcgccgttggttggtttatttgacctattactctcctaggtttctctataaacgatggtttaatttgtacattcttaaccatatatccaataaagctcaattcaggaacataaacaaattctttgttgaacgtttcaaagtcgaacgaagagtcacgaataacgatatcggatactggattgaaggttaccgttacggtaatttttgaatcggatagtttaagactgctgaatgtatcttccacatcaaacggagttttaatataaacgtatactgtagatggttctttaatagtgtcattaggagttaggccaatagaaatatcattaagttcactagaatatccagagtgtttcaaagcaattgtattattgatacaattattatataattcttcgccctcaatttcccaaataacaccgttacacgaagagatagatacgtgattaatacatttatatccaacatatggtacgtaaccgaatcttcccatacctttaacttctggaagttccaaactcagaaccaaatgattaagcgcagtaatatactgatccctaatttcgaagctagcgatagcctgattgtctggaccatcgtttgtcataactccggatagagaaatatattgcggcatatacaaagttggaatttgactatcgactgcgaagacattagaccgtttaatagagtcatccccaccgatcaaagaattaatgatagtattattcattttctatttaaaatggaaaaagcttacaataaactccgtagagaaatatctataatttgtgagttttccttaaagtaacagcttccgtaaacgccgtctttatctcttagtaggtttattgtatttatgaccttttccttatcttcatagaatactaaaggcaacaaagaaatttttggttcttctctaagagctacgtgagacttaaccatagaagccaacgaatccctacatattttagaacagaaatacccaacttcaccacccttgaatgtctcaatactaataggtctaaaaaccaaatcttgattacaaaaccaacacttatcaattacactatttgtcttaatagacacatctgccatagatttataatactttggtagtatacaagcgagtgcttcttctttagcgggcttaaagactgctttaggtgctgaaataaccacatctggaaggcttactcgcttagccatttaattacggaactatttttttatacttctaatgagcaagtagaaaacctctcatctacaaaaacatactcgtgtccataatcctctaccatagttacacgttttttagatctcatatgtgctaaaaagttttcccatactaattggttactattatttttcgtataatttttaacagtttgaggttttagatttttagttacagaagtgatatcgaatattttatccaaaaagaatgaataattaattgtcttagaaggagtgttttcttggcaaaagaataccaagtgcttaaatatttctactacttcattaatcttttctgtactcagattcagtttctcatcttttacttgattgattatttcaaagactaacttataatcctttttatttattctctcgttagccttaagaaaactagatacaaaatttgcatctacatcatccgtggatatttgatttttttccatgatatccaagagttccgagataatttctccagaacattgatgagacaataatctccgcaatacatttctcaaatgaataagtttattagacacatggaagtttgactttttttgtacctttgtacatttttgaaatacagactcgcaaaaaatacaatattcatatccttgttcagatactataccgttgtgtctacaaccgctacataatcgtagattcatgttaacactctacgtatctcgtcgtccaatattttatataaaaacattttatttctagacgttgccagaaaatcctgtaatatttttagttttttgggctgtgaataaagtatcgccctaatatggttaccgtcctccgccaatatagtagttaaattatccgcacatgcagaagaacaccgcttaggcggattcagtacaatgttatatttttcgtaccaactcatttaaatatcataatctaaaatagttctgtaatatgtctagcgctaatatattgatcataatcctgtgcataaattaagatacaacaatgtctcgaaatcatcgacatggcttcttccatagttagaagatcgtcgtcaaagttagcaacgtgattcatcaacatttgctgttttgaggcagcaaatactgaaccgtcgccattcaaccattcataaaaaccatcgtctgaatccattgataatttcttgtactggtttttgagagctcgcatcaatctagcatttctagctcccggattgaaaacagaaagaggatcgtacatccagggtccattttctgtaaatagaatcgtataatgtcccttcaagaagatatcagacgatccacaatcaaagaattggtctccgagtttgtaacaaactgcggactttaacctatacatgataccgtttagcatgatttctggtgatacgtcaatcggagtatcatctattagagatctaaagccggtgtaacattctccaccaaacatattcttattctgacgtcgttctacataaaacatcattgctccattaacgataacaggggaatgaacagcactacccatcacattagttcccaatggatcaatgtgtgtaactccagaacatcttccatatcctatgttaggaggagcgaacaccactcttccactattgccatcgaatgccatagaataaatatccttggaattgatagaaatcggactgtcggatgttgtgatcatcttcataggattaacaactatgtatggtgccgcctgaagtttcatatcgtaactgatgccgtttataggtctagccacagaaaccaacgtaggtctaaatccaactatagacaaaatagaagccaatatctgttcttcatctgtcataacttgagagcatccagtatgaataatcttcattagatggggatctaccgcatcatcatcgttacaataaaaaattcccattctaatgttcataattgcttttctaatcatggtatgcatgtttgctctctgaatctctgtggaaattagatctgatacacctgtaatcactatcggattatcctccgtaagacgattaaccaacaacatataattataagactttacttttctaaattcataaagttgctggattaggctataggtgtctccatgtacatacgcgttctcgagcgcaggaagtttaataccgaatagtgccatcagaataggatgaatatagtaattagtttctggttttctataaataaaagacaaatcttgtgaactagacatatcggtaaaatgcatggattggaatcgtgtagtcgacagaagaatatgatgattagatggagagtatattttatctaactctttgagttggtcaccgattctaggactagctcgagaatgaataagtactaaaggatgagtacatttcacagaaacactagcattgttcaatgtgctctttacatgggtaaggagttgaaatagctcgtttctatttgttctgacaatatttagtttattcataatgttaagcatatcctgaatagtaaagttagatgtgtcatacttgttagtagttagatatttagcaattgcattcccatcatttctcaatctcgtactccaatcatgcgtggatgctacttcgtcgatggaaaccatacaatcctttttgataggctgttgagattgattatttcctgcacgtttaggtttggtacgttgatttctagcccctgcggatataaagtcatcgtctacaattttggataatgaattgcatacactacaagacaaagatttatcagaagtgtgaatatgatcttcatctaccaaagaaagagtttgattagtataactagattttagtcctgcgttagatgttaaaaaaacatcgctattgaccacggcttccattatttatattcgtagtttttactcgaaagcgtgattttaatattcaatcttattacttttggaatcgttcaaaacctttgactaattgtagaatttgatctattgccctacgcgtatactcccttgcatcatatacgttcgtcaccagatcgtttgtttcggcctgaagttggtgcatatctctttcaacattcgacatgagatccttaagggccatatcgtctagattttgttgagatgctgctcctggatttggattttgttgtgctgttgtacatactgtaccaccagtaggtgtaggagtacatacagtggccacaataggaggttgaggaggtgtaaccgttggagtagtacaagaaatacttccatccgattgttgtgtacatgtagttgttggtaacgtctgagaaggttgggtagatggcggcgtcgtcgtcttttgatctttattaaatttagagataatatcctgaacagcattgctcggcgtcaacgctggaaggagtgaactcgccggcgcatcagtatctgcagacagccaatcaaaaagattagacatatcagatgatgtattagtttgttgtcgtggttttggtgtaggagccggtgtagctgttggaaccggctgtggagttatatgaatagttggttgtagcggttggataggctgtctgctggcggccatcatattatctctagctagttgttctcgcaactgtctttgataatacgactcttgagactttagtcctatttcaatcgcttcatcctttttcgtatccggatccttttcttcagaataatagattgacgactttggtgtagaggattctgccagcccctgtgagaacttgttaaagaagtccatttaaggctttaaaattgaattgcgattataagattaaatggcagacacagacgatattatcgactatgaatccgatgatctcaccgaatacgaggatgatgaagaagaggaagaagatggagagtcactagaaactagtgatatagatcccaaatcttcttataagattgtagaatcagcatccactcatatagaagatgcgcattccaatcttaaacatatagggaatcatatatctgctcttaaacgacgctatactagacgtataagtctatttgaaatagcgggtataatagcagaaagctataacttgcttcaacgaggaagattacctctagtttcagaattttctgacgaaacgatgaagcaaaatatgctacatgtaattatacaagagatagaggagggttcttgtcctatagtcatcgaaaagaacggagaattgttgtcggtaaacgattttgacaaagatggtctaaaattccatctagactatattatcaaaatttggaaacttcaaaaacgatattagaatttatacgaatatcgttctctaaatgtcacaatcaagtctcgcatgttcagcaatttattgtcgtactttatatcgtgttcattaacgatatcttgcaaaatagtaatgattctatcttccttcgatagatattcttcagagattattgtcttatattctttcttgttatcagatatgaatttgataagactttgaacattattgatacccgtctgtttaattttttctacagatattttagttttggcagattctatcgtatctgtcaatagacatccaacatcgacattcgacgtcaattgtctataaatcaacgtataaattttagaaataacattagcgaattgttgtgcattgatgtcgttattctgaaacagtatgattttaggtagcattttcttaacaaagagaacgtatttattgttactcagttgaacagatgatatatccagattactaacgcatctgattccatataccaaactttcagaagaaatggtgtacaattgtttgtattcattcaatgtctctttttcagaaattagtttagagtcgaatactgcaataattttcaagagatagttttcatcagataagattttatttagtgtagatatgataaaactattgttttgttggagaacttgatacgccgcgttctctgtagtcgacgctctcaaatgggaaacaatctccattatttttttggaatcggatacaatatcttcggtatcttgacgcaatctagtatacatagagttaagagaaattagagtttgtacattaagcaacatgtctctaaatgtggctgcaaacttttccttttccacatcatctagtttattatataccgatttcacaacggcaccagatttaaggaaccagaatgaaaaactctgataactacaatatttcatcatagttacgattttatcatcttctatagttggtgtaatagcgcatacctttttctccaagactggaaccaacgtcataaaaatgtttaaatcaaaatccatatcaacatctgatgcgctaagaccagtctcgcgttcaagattatctttactaatggtgacgaactcatcgtatagaactctaagtttgtccattatttatttacagatttagttgtttaatttatttgtgctcttccagagttgggatagtatttttctaacgtcggtattatattattaggatctacgttcatatgtatcataatattaatcatccacgttttgataaatctatctttagcttctgaaataacgtatttaaacaaaggagaaaaatatttagctacggcatcagacgcaataacattttttgtaaatgtaacgtatttagacgacagatcttcgttaaaaagttttccatctatgtagaatccatcggttgttaacaccattcccgcgtcagattgaataggagtttgaatagtttgttttggaaatagatccttcaataacttatagttgggtgggaaaaaatcgattttatcactagactctttcttttttactatcattacctcatgaactatttcttgaatgagtatatgtattttctttcctatatcggacgcgttcattggaaaatataccatgtcgttaactataagaatatttttatcctcgtttacaaactgaataatatcagatgtagttcgtaaacgaactatatcatcaccagcacaacatctaactatatgatatccactagtttcctttagtcgtttattatcttgttccatattagcagtcattccatcatttaagaaggcgtcaaagataatagggagaaatgacattttggattctgttacaactttaccaaaattaaggatatacggacttactatctttttctcaacgtcgatttgatgaacacacgatgaaaatgtacttcgatgagattgatcatgtagaaaacaacaagggatacaatatttccacatatcatgaaatatattaagaaatcccaccttattatatttccccaaaggatccatgcatgtaaacattatgccgttatcattaataaagacttctttctcatcggatctgtaaaagttgttactgatttttttcattccaggatctagataattaataatgatgggttttctattcttattctttgtattttggcatatcctagaccagtaaacagtttccactttggtaaaatcagcagacttttgaacgctattaaacatggcattaatggcaataactaaaaatgtaaaatatttttctatgttaggaatatggtttttcactttaatagatatatggtttttggccaaaatgatagatatttttttatccgaggatagtaaaatattattagtcgccgtctctataaaaatgaagctagtctcgatatccaattttattctagaattgataggagtcgccaaatgtaccttatacgttatatctcccttgatgcgttccatttgtgtatctatatcggacacaagatctgtaaatagttttacgttattaatcatcacggtatcgccgtcgctagataacgctaatgtaccatccaagtcccaaatggagagatttaactgttcatcgtttagaataaaatgattaccggtcatattaataaagtgttcatcgtatctagataacaacgacttataattaatgtccaagtcttgaactcgctgaatgatcttttttaacccagttagttttagattggtacgaaatatattgttaaactttgattctacagtaatgtccaaatctagttgtggaaatacttccatcaacattgtttcaaacttgataatattattatctacatcttcatacgatccaaattccggaatagatgtatcgcacgctctggccacccagataaccaaaaagtcacacgctccaggatatacattgtataaaaagctatcgttttttagtagtgtttttttctgagtatatacgaagggattaaaaatagtattatcaacgtaactatattccaaattattcttatgagaatagataataatatcgtccttaatatctaacaaatttcctaaatatccctttaattgagtcattcgaagcgtcaatagaatatgtctcttaactatttccggctgttgtatatttaaatgacttcgtaaaaaataatatatgggcgacttctcatctatgtaatcatatggagtgagatatagggctcgttctacctcctgccccttacccacctgtaataccaattgcggacttactatatatcgcatatttatatcgtggggtaaagtgaaaatctactaccgatgatgtaagtcttacaatgttcgaaccagtaccagatcttaatttggaggcctccgtagaactaggggaggtaaatatagatcaaacaacacctatgataaaggaaaatagcggttttatatcccgtagtagacgtctattcgcccatagatctaaggatgatgagagaaaactagcactacgattctttttacaaagactttattttttagatcatagagagattcattatttgttcagatgcgttgacgctgtaaaagacgtcactattaccaaaaaaaataacattatcgtggcgccttatatagcacttttaactatcgcatcaaaaggatgcaaacttacagaaacaatgattgaagcattctttccagaactatataatgaacatagtaagaaatttaaattcaactctcaagtatccatcatccaagaaaaactcggataccagtttggaaactatcacgtttatgattttgaaccgtattactctacagtagctctggctattcgagatgaacattcatctggcatttttaatatccgtcaagagagttatctggtaagttcattatctgaaataacatatagattttatctaattaatctaaaatctgatcttgttcaatggagtgctagtacgggcgctgtaattaatcaaatggtaaatactgtattgattacagtgtatgaaaagttacaactggtcatagaaaatgattcacaatttacatgttcattggctgtggaatcaaaacttccaataaaattacttaaagatagaaatgaattatttacaaaattcatcaacgagttaaaaaagaccagttcattcaagataagcaaacgcgataaggatacgctactaaaatattttacttaggactggagttagaatttatagacgactcatttcgtttatcattattagtattcttcttgttatcttgttcagaaatatacagcaatgctatgcctaatactaaatacattatcatgcttgcaatggctctaacaacgacgaaccaaaatgaatttggtcgtagcttttgttcacaaaaatacataaagaaatgtctacataaatctatggcgccattggctacttgaaatagcgccagtcctcctacagattttaatatagctgtataacatgacatttattcatcatcaaaagagacagagtcaccatctgtcatatttagattttttttcatgtgttcaaagtatcctctactcatttcattataatagtttatcatacttagaattttaggacggatcaatgagtaagacttgactagatcgtcagtagtaatttgtgcatcgtctattctgcatccgcttcgtcgaataatgtatagcatcgctttgagattctccatagctatcaagtctttatacaatgacatggaaatatctgtgaatactttatacttctccaacatcgatgccttaacatcatcgcctactttagcattgaaaatacgttctattgtgtagatggatgtagcaagatttttaaacaacaatgccattttacacgatgattgcctcaagtctccaatcgtttgtttagaacgattagctacagagtccaatgcttggctgactagcatattattatctttagaaattgtattcttcaatgaggcgtttatcatatctgtgatttcgttagtcatattacagtctgactgggttgtaatgttatccaacatatcacctatggatacggtacacgtaccagcatttgtaataatcctatctaagatgttgtatggcattgcgcagaaaatatcttctcctgtaatatttccactctcgataaatctactcagattattcttaaatgccttattctctggagaaaagatatcagtgtccatcatttcattaatagtatacgcagaaaagataccacgagtatcaattctatccaagatacttatcggttccgagtcacagataatggtttcctctccttcgggagatcctgcatagaaatatctaggacaatagtttctatactgtctgtaactctgataatctctaaagtcactaactgataccatgaaattgagaagatcaaacgctgaagtaattaatttttctgcctcgtttttactacaactagttttcatcaatgtagtgacgatgtattgtttagttactcttggtctaatactgatgatagagatattattacttcccataatggatcttctagtagtcaccttaaagcccattgatgcaaatagcagatagataaagtcttggtatgactcctttctaatatagtacggactacctttgtcacccaactttatacccacataagccataacaacctctttaatagccgtttcatgaggtttatcagccatgagcctgagtagttggaagaatctcatgaatcctgtctcagaaagtcctatatgcatgatagatttatctttcctgggaaactctcgtatagtcatagatgaaatactcttcaaagtttctgaaataagattagtaacagtcttacctccgactactctaggtaacaaacaaactctaataggtgttttctctgcggagataatatcagaaaggatagagcaataagtagtattattgtgattataaagaccgaatacataacaggtagaatttataaacatcatgtcctgaaggtttttagacttgtattcctcgtaatccataccgtcccaaaacatggatttggtaactttgatagccgtagatctttgttccttcgccaacaggttaaagaaattaataaagaatttgtggtttctacctatgtctacaaattgcacgtttggaagcgccacggttacattcactgcagcattttgaggatcgcgagtatgaagtacgatgttattgtttactggtatatctggaaagaattctaccagtctaggaataagagattgatatcgcatagaaatacaaaagttcataatctcatcatctaagagcattttgttaccattgtaataaatatccactctgtcatatgtataaatgaagtactgttcaaacatgatgagatgtttatatgttggcatagtagtgagatctacgtttggtaatggcaatgtattaagattaactccataatgtctagcagcatctgcgatgttataagcgttgtcaaagcggggtcgatcttgtgctgttatatattgtctaacacctataagattatcaaaatcttgtctgcttaatacaccgttaacaatttttgccttgaattcttttattggtgcattaataacatccttatagaggatgttaaacaaataagtgttatcaaagttaagatctggatatttcttttctgctagaacatccattgagtcggagccatctggtttaatataaccaccgataaatctagctctgtattctgtatccgtcaatctaatattaagaaggtgttgagtgaaaggtggaagatcgtaaaagctgtgagtattaatgataggattagtttccgaactaatgttaattggggtattaataatatctatatttccagcgttaagtgtaacattaaacagttttaattcacgtgacgtggtatcaattaaataattaatgcccaatttggatatagcagcctgaagctcatcttgtttagttacggatcctaatgagttattaagcaatatatcgaacggatgaacgaaggttgttttaagttggtcacatactttgtaatctagacatagatgcggaagaacggtagaaactatacgaaataaatattcagagtcctctaattgatcaagagtaactattgacttaataggcatcatttatttagtattaaatgacgaccgtaccagtgacggatatacaaaacgatttaattacagagttttcagaagataattatccatctaacaaaaattatgaaataactcttcgtcaaatgtctattctaactcacgttaacaacgtggtagatagagaacataatgccgccgtagtgtcatctccagaggaaatatcctcacaacttaatgaagatctatttccagatgatgattctccggccactattatcgaacgagtacaacctcatactactattattgacgatactccacctcctacgtttcgtagagagttattgatatcggaacaacgtcaacaacgagaaaaaagatttaatattacagtatcgaaaaatgctgaagcaataatggaatctagatctatgatatcttctatgccaacacaaacaccatccttgggagtagtttatgataaagataaaagaattcagatgttggaggatgaagtggttaatcttagaaatcaacgatctaatacaaaatcatctgataatttagataattttaccagaatactatttggtaagactccgtataaatcaacagaagttaataagcgtatagccatcgttaattatgcaaatttgaacgggtctcccttatcagtcgaggacttggatgtttgttcagaggatgaaatagatagaatctataaaacgattaaacaatatcacgaaagtagaaaacgaaaaattatcgtcactaacgtgattattattgtcataaatattatcgagcaagcattgctaaaactcggatttgaagaaatcaaaggactgagtaccgatatcacttcagaaattatcgatgtggagatcggagatgactgcgatgctgtagcatcaaaactaggaatcggtaacagtccggttcttaatattgtattgtttatactcaagatattcgttaaacgaattaaaattatttaatttaatacattcccatatccagacaacaatcgtctggattaatctgttcctgtcgtctcataccggacgacatattaatctttttattagtaggcatctttttagatggtttctttttcccagcattaactgagtcgatacctagaagatcgtgattgatctctccgaccattccacgaacttctaattggccgtctctgacggtaccataaactattttaccagcattagtaacagcttggacaatctgaccatccatcgcattgtacgatgtagtagtaactgttgttctacgtctaggagcaccagaagtatttttggagcccttggatgttgatgtagaagaagacgaggattttgattttggtttacatgtaatacattttgtatcacatgcgccggcagtcacatctgtttgagaattaagattattgttgcctcctttgacggctgcatctccaccgatttgcgctagtagatttttaagctgtggtgtaatcttattaactgtttcgatataatcatcgtaactgcttctaacggctaaattttttttatccgccatttagaagctaaaaatatttttatttatgcagaagatttaactagattatacaatgaactaatatgatccttttccagattatttacaaacttggtattttttggttctggaggaggcgaatttaaattcggacttggatttggattttgtgggttcttgatcttattatacagcgcatataggatggcgacggtaactgctacgcaaataccgatcaacaaaagaataccaatcatttattgacaataacttcactattgatcaagtatgcaatatatcatcttttcactaaataagtagtaataatgattcaacaatgtcgagatatatggacgataataatttagttcatggaaatatcgctatgattggtatgaatgactccgctaactctgtggggcgcgcagtgctttccccacatagaataaattagcattccgactgtgataataataccaagtataaacgccataatactcaatactttccatgtacgagtgggactggtagacttactaaagtcaataaaggcgaagatacacgaaagaatcaaaagaatgattccagcgattagcacgccggaaaaataatttccaatcataagcatcatatccatttaactaataaaaattttaaatcgccgaatgaacaaagtggaatataaaccatataaaaacaatagtttgtactgcaaaaataatatctatttttgttttcgaagatatggtaaaattaaatagtagtacacagcatgttataactaacagcagcaacggctcgtaattacttatcatttactagacgaaaaggtggtgggatattttcttgctcaaataatacgaatatatcacccatccattttatgcgatgtttatatactctaatctttaatagatctatagacgacgggtttaccaacaatatagattttatcgattcatctaatttaaacccttccttaaacgtgaatgatctattatctggcataacgatgactctacccgatgaatcggacaatgtactgggccatgtagaataaattatcaacgaattatcgtctacgaacatttatatcatttgttttaattttagtacgcgaataaatagatataaaatagaaaataacagatattacaaccaatgttatggccgcgcccggccggccgcggccgctttttttctagacactaaataaatagtaagattaaattaattataaaattatgtatataatattaattataaaattatgtatatgatttactaactttagttagataaattaataatacataaattttagtatattaatattataaattaataatacataaattttagtatattaatattatattttaaatatttatttagtgtctagaaaaaaaggcctagcaggcc

SEQ ID NO: 4 - DNA, 62068 bp, synthetic construct
  source 1..62068: mol_type = other DNA
ggcctagcaggcctttttttctagacactaaataaatagtaagattaaattaattataaaattatgtatataatattaattataaaattatgtatatgatttactaactttagttagataaattaataatacataaattttagtatattaatattataaattaataatacataaattttagtatattaatattatattttaaatatttatttagtgtctagaaaaaaaggccggccgggtattaataatatctatatttccagcgttaagtgtaacattaaacagttttaattcacgtgacgtggtatcaattaaataattaatgcccaatttggatatagcagcctgaagctcatcttgtttagttacggatcctaatgagttattaagcaatatatcgaacggatgaacgaaggttgttttaagttggtcacatactttgtaatctagacatagatgcggaagaacggtagaaactatacgaaataaatattcagagtcctctaattgatcaagagtaactattgacttaataggcatcatttatttagtattaaatgacgaccgtaccagtgacggatatacaaaacgatttaattacagagttttcagaagataattatccatctaacaaaaattatgaaataactcttcgtcaaatgtctattctaactcacgttaacaacgtggtagatagagaacataatgccgccgtagtgtcatctccagaggaaatatcctcacaacttaatgaagatctatttccagatgatgattctccggccactattatcgaacgagtacaacctcatactactattattgacgatactccacctcctacgtttcgtagagagttattgatatcggaacaacgtcaacaacgagaaaaaagatttaatattacagtatcgaaaaatgctgaagcaataatggaatctagatctatgatatcttctatgccaacacaaacaccatccttgggagtagtttatgataaagataaaagaattcagatgttggaggatgaagtggttaatcttagaaatcaacgatctaatacaaaatcatctgataatttagataattttaccagaatactatttggtaagactccgtataaatcaacagaagttaataagcgtatagccatcgttaattatgcaaatttgaacgggtctcccttatcagtcgaggacttggatgtttgttcagaggatgaaatagatagaatctataaaacgattaaacaatatcacgaaagtagaaaacgaaaaattatcgtcactaacgtgattattattgtcataaatattatcgagcaagcattgctaaaactcggatttgaagaaatcaaaggactgagtaccgatatcacttcagaaattatcgatgtggagatcggagatgactgcgatgctgtagcatcaaaactaggaatcggtaacagtccggttcttaatattgtattgtttatactcaagatattcgttaaacgaattaaaattatttaatttaatacattcccatatccagacaacaatcgtctggattaatctgttcctgtcgtctcataccggacgacatattaatctttttattagtaggcatctttttagatggtttctttttcccagcattaactgagtcgatacctagaagatcgtgattgatctctccgaccattccacgaacttctaattggccgtctctgacggtaccataaactattttaccagcattagtaacagcttggacaatctgaccatccatcgcattgtacgatgtagtagtaactgttgttctacgtctaggagcaccagaagtatttttggagcccttggatgttgatgtagaagaagacgaggattttgattttggtttacatgtaatacattttgtatcacatgcgccggcagtcacatctgtttgagaattaagattattgttgcctcctttgacggctgcatctccaccgatttgcgctagtagatttttaagctgtggtgtaatcttattaactgtttcgatataatcatcgtaactgcttctaacggctaaattttttttatccgccatttagaagctaaaaatatttttatttatgcagaagatttaactagattatacaatgaactaatatgatccttttccagattatttacaaacttggtattttttggttctggaggaggcgaatttaaattcggacttggatttggattttgtgggttcttgatcttattatacagcgcatataggatggcgacggtaactgctacgcaaataccgatcaacaaaagaataccaatcatttattgacaataacttcactattgatcaagtatgcaatatatcatcttttcactaaataagtagtaataatgattcaacaatgtcgagatatatggacgataataatttagttcatggaaatatcgctatgattggtatgaatgactccgctaactctgtggggcgcgcagtgctttccccacatagaataaattagcattccgactgtgataataataccaagtataaacgccataatactcaatactttccatgtacgagtgggactggtagacttactaaagtcaataaaggcgaagatacacgaaagaatcaaaagaatgattccagcgattagcacgccggaaaaataatttccaatcataagcatcatatccatttaactaataaaaattttaaatcgccgaatgaacaaagtggaatataaaccatataaaaacaatagtttgtactgcaaaaataatatctatttttgttttcgaagatatggtaaaattaaatagtagtacacagcatgttataactaacagcagcaacggctcgtaattacttatcatttactagacgaaaaggtggtgggatattttcttgctcaaataatacgaatatatcacccatccattttatgcgatgtttatatactctaatctttaatagatctatagacgacgggtttaccaacaatatagattttatcgattcatctaatttaaacccttccttaaacgtgaatgatctattatctggcataacgatgactctacccgatgaatcggacaatgtactgggccatgtagaataaattatcaacgaattatcgtctacgaacatttatatcatttgttttaattttagtacgcgaataaatagatataaaatagaaaataacagatattacaaccaatgttatggccgcgcccaaccaggtaggcagttttattttatcttttactacaggttctcctggatgtacgtcaccaacggcggacgtagttctagtacaattagacgtaagttccgcttgggaattttttaacgctaaagagttaacgttaatcgtgcacccaacgtatttacatctagttctttgaacatcttgattataatataaccattttctatctctagattcgtcggtgcactcatgtaaccaacataccctaggtcctaaatatttatctccggaattagattttggataattcgcgcaccaacaatttctatttcctttatgatcgttacaaaagacgtataatgccgtatccccaaaagtaaaataatcaggacgaataattctaataaactcagaacaatatctcgcatccatatgtttggagcaaatatcggaataagtagacatagccggtttccgttttgcacgtaaccattctaaacaattggggtttccaggatcgtttctacaaaatccagtcatgaaatcatcacaatgttctgtcttgtaattattattaaatatttttggacagtgtttggtatttgtcttagaacaacattttgccacgctatcactatcgcccaggagataatccttttttataaaatgacatcgttgcccggatgctatataatcagtagcgtgttttaaatccttaatatattcaggagttacctcgttctgataatagattaatgatccaggacgaaatttgaaagaactacatggttctccatgaattaatacatattgtttagcaaattcaggaactataaaactactacaatgatctatcgacataccatctatcaaacaaaacttgggtttaatttctcccggagatgtttcataatagtacgtataactttcttctgcaaacttaacagctctattatattcaggataattaaaacctaattccatatatttgtctcgtatatctgctattcctggtgctattttgattctattaagagtaacggctgcccccatttttaataatcgtcagtatttaaactgttaaatgttggtatatcaacatttaccttatttcccgcagtataaggtttgttgcaggtatactgttcaggaatggttacatttatactttttctatagtcctgtctttcgatgttcatcacatatgcaaagaacagaataaacaaaataatgtaagaaataatattaaatatctgtgaattcgtaaatacattgattgccataataattacagcagctacaatacatacaatagacattcccacagtgttgccattacctccacgatacatttgagttactaagcaataggtaataactaagctagtaagaggcaatagaaaagatgagataaatatcatcaatatagagattagaggagggctatatagagccaagacgaacaaaatcaaaccgagtaacgttctaacatcattatttttgaagattcccaaataatcattcattcctccataatcgttttgcatcatacctccatctttaggcataaacgattgctgctgttcctctgtaaataaatctttatcaagcactccagcacccgcagagaagtcgtcaagcatattgtaatatcttaaataactcatttatatattaaaaaatgtcactattaaagatggagtataatctttatgccgaactaaaaaaaatgacttgtggtcaacccctaagtctttttaacgaagacggggatttcgtagaagttgaaccgggatcatcctttaagtttctgatacctaagggattttacgcctctccttccgtaaagacgagtctagtatttgaaacattaacaacgaccgataataaaattactagtatcaatccaacaaatgcgccaaagttatatcctcttcaacgcaaagtcgtatctgaagtagtttctaatatgaggaaaatgatcgaatcaaaacgtcctctatacatcactcttcacttggcgtgtggatttggtaagactattaccacgtgttatcttatggctacacacggtagaaaaaccgtcatttgcgtacccaataaaatgttaatacatcaatggaagacacaggtagaggcagtcggattggaacataagatatccatagatggagtaagtagtctattaaaggaactaaagactcaaagtccggatgtattaatagtagtcagtagacatctgacaaacgatgccttttgtaaatatatcaataagcattatgatttgttcatcttggatgaatcacatacgtataatctgatgaacaatacagcagttacaagatttttagcgtattatcctccgatgatgtgttattttttaactgctacacctagaccatctaacagaatttattgtaacagtattattaatattgccaagttatccgatctaaaaaaaactatctatgcagtagatagtttttttgagccatattccacagataatattagacatatgataaaacgattagatggaccatctaataaatatcatatatataccgagaagttattatctgtagacgagcctagaaatcaacttattcttaataccctggtagaagaattcaagtcaggaactattaatcgcattttagttattactaaactacgtgaacatatggtattcttctacaaacgattattagattttttcggatcagaggttgtatttataggagacgcccaaaatagacgtactccagatatggtcaaatcaatcaaggaactaaatagatttatattcgtatccaccttattttattccggtactggtttagatattcctagtttggattctttgttcatttgctcggcagtaatcaacaatatgcaaatagagcaattactagggagggtatgtcgagaaacagaactattagataggacggtatatgtatttcctagcacatccatcaaagaaataaagtacatgataggaaatttcgttcaacgaattattagtctgtctgtagataaactaggatttaaacaaaaaagttatcggaaacatcaagaatccgatcccacttctgtatgtacaacatcctccagagaagaacgtgtattaaatagaatatttaactcgcaaaatcgttaagaagtttaagcgacgatccgcatgctgcgcaggccagtgtattacccctcatagtattaatataatccaatgatacttttgtgatgtcggaaatcttaaccaatttagactgacaggcagaacacgtcatgcaatcatcatcgtcatcgataactgtagtcttgggcttctttttgcggctcttcattccggaacgcacattggtgctatccatttaggtagtaaaaaataagtcagaatatgccctatagcacgatcgtgcaaaacctggtatatcgtctctatctttatcacaatatagtgtatcgacatctttattattattgacctcgtttatcttggaacatggaatgggaacatttttgttatcaacggccacctttgccttaattccagatgttgtaaaattataactaaacagtctatcatcgacacaaatgaaattcttgtttagacgtttgtagtttacgtatgcggctcgttcgcgtctcattttttcagatattgcaggtactataatattaaaaataagaatgaaataacataggattaaaaataaagttatcatgacttctagcgctgatttaactaacttaaaagaattacttagtctgtacaaaagtttgaaattttcagattctgcggctatagaaaagtataattctttggtagaatggggaacatctacttactggaaaataggcgtgcaaaaggtagctaatgtcgagacgtcaatatctgattattatgatgaggtaaaaaataaaccgtttaatattgatccgggctattacattttcttaccggtatattttgggagcgtctttatttattcgaagggtaaaaatatggtagaacttggatctggaaactcttttcaaataccagatgatatgcgaagtgcgtgtaacaaagtattagacagcgataacggaatagactttctgagatttgttttgttaaacaatagatggataatggaagatgctatatcaaaatatcagtctccagttaatatatttaaactagctagtgagtacggattaaacatacccaaatatttagaaattgaaatagaggaagacacattatttgacgacgagttatactctattatagaacgctctttcgatgataaatttccaaaaatatccatatcgtatattaagttgggagaacttaggcggcaagttgtagactttttcaaattctcattcatgtatattgagtccatcaaggtagatcgtataggagataatatttttattcctagcgttataacaaaatcaggaaaaaagatattagtaaaagatgtagaccatttaatacgatccaaggttagagaacatacatttgtaaaagtaaaaaagaaaaacacattttccattttatacgactatgatggaaacggaacagaaactagaggagaagtaataaaacgaattatagacactataggacgagactattatgttaacggaaagtatttctctaaggttggtagtgcaggcttaaagcaattgactaataaattagatattaatgagtgcgcaactgtcgatgagttagttgatgagattaataaatccggaactgtaaaacgaaaaataaaaaaccaatcagcatttgatttaagcagagaatgtttgggatatccagaagcggattttataacgttagttaataacatgcggttcaaaatagaaaattgtaaggttgtaaatttcaatattgaaaatactaattgtttaaataacccgagtattgagactatatatggaaactttaaccagttcgtctcaatctttaatatcgtcaccgatgtcaaaaaaagattattcgagtgaaataatatgcgcctttgatataggtgcaaaaaatcctgccagaactgttttagaagtcaaggataactccgttagggtattggatatatcaaaattagactggagttctgattgggaaaggcacatagctaaagatttgtcacaatatgaatacactacagttcttctagaacgtcagcctagaaggtcgccgtacgtcaaatttatctattttattaaaggctttttatatcatacatcggctgccaaagttatttgcgtctcgcctgtcatgtctggtaattcatatagagatcgaaaaaagagatcggtcgaagcatttcttgattggatggacacattcggattgcgagactccgttccggatagacgcaaattagacgatgtagcggatagtttcaatttggctatgagatacgtattagataaatggaatactaattatacaccttataataggtgtaaatctagaaattacataaaaaaaatgtaataacgttagtaacgccattatggataatctatttacctttctacatgaaatagaagatagatatgccagaactatttttaactttcatctaataagttgcgatgaaataggagatatatatggtcttatgaaagaacgcatttcctcagaggatatgtttgataatatagtgtataataaagatatacatcatgccattaagaaactagtgtattgcgacatccaacttactaaacacattattaatcagaatacgtatccggtatttaacgattcttcacaagtgaaatgttgtcattatttcgatataaactcagataatagcaatattagctctcgtacagtagagatatttgagagggaaaagtcatctcttgtatcatatattaaaactaccaataagaagagaaaggtcaattatggggaaataaagaaaactgtacatggaggcactaatgcaaattacttttccggtaaaaagtctgatgagtatctgagcactacagtcaggtccaacattaatcaaccttggatcaaaaccatttctaagagaatgagagtagatatcattaatcactctatagtaacgcgtggaaaaagctctatattacaaactatagaaattatttttactaatagaacatgtgtgaaaatattcaaggattctactatgcacattattctatccaaggacaaggatgaaaaggggtgtatacacatgattgacaaattattctatgtctattataatttatttctgttgttcgaggatatcatccaaaacgagtactttaaagaagtagctaatgttgtaaaccacgtactcacggctacggcattagatgagaaattattcctaattaagaaaatggctgaacacgatgtttatggagttagcaatttcaaaatagggatgtttaacctgacatttattaagtcgttggatcataccgttttcccctctctgttagatgaggatagcaaaataaagttttttaaggggaaaaagctcaatattgtagcattacgatctctggaggattgtataaattacgtgactaaatccgagaatatgatagaaatgatgaaggaaagatcgactattttaaatagcatagatatagaaacggaatcggtagatcgtctaaaagaattgcttctaaaatgaaaaaaaaacactaattcagaaatggatcaacgactcggatataagtttttggtgcctgatcctaaagccggagttttttatagaccgttacatttccaatatgtatcgtattctaattttatattgcatcgattgcatgaaatcttgaccgtcaagcggccactcttatcgtttaagaataatacagaacgaattatgatagaaattagcaatgttaaagtgactcctccagattactcacctataatcgcgagtattaaaggtaagagttatgacgcattagccacgttcactgtaaatatctttaaagaggtaatgaccaaagagggtatatccatcactaaaataagtagttatgagggaaaagattctcatttgataaaaattccgctactaataggatacgggaataaaaatccacttgatacagccaagtatcttgttcctaatgtcataggtggagtctttatcaataaacaatctgtcgaaaaagtaggaattaatctagtagaaaagattacaacatggccaaaatttagggttgttaagccaaactcattcactttctcgttttcctccgtatcccctcctaatgtattaccgacaagatatcgccattacaagatatctctggatatatcacaattggaagcgttgaatatatcatcgacaaagacatttataacggtcaatattgttttgctgtctcaatatttatctagagtgagtctagaattcattagacgtagtttatcatacgatatgcctccagaagttgtctatctagtaaacgcgataatagatagtgctaaacgaattactgaatctattactgactttaatattgatacatacattaatgacctggtggaagctgaacacattaaacaaaaatctcagttaacgatcaacgagttcaaatatgaaatgctgcataactttttacctcatatgaactatacacccgatcaactaaagggattttatatgatatctttactaagaaagtttctctactgtatctaccacacttctagatatccagatagagattcgatggtttgtcatcgcatcctaacgtacggcaaatattttgagacgttggcacatgatgaattagagaattacataggcaacatccgaaacgatatcatgaacaatcacaagaacagaggcacttacgcggtaaacattcatgtactaacaactcctggacttaatcatgcattttctagtctattgagtggaaagttcaaaaagtcagacggtagttatcgaacacatcctcactattcatggatgcagaatatttctattcctaggagtgttggattttatccggatcaagtaaagatttcaaagatgttttctgtcagaaaataccatccaagtcaatatctttacttttgttcatcggacgttccggaaagaggtcctcaggtaggtttagtatctcaattgtctgtcttgagttccattacaaatatactaacgtctgagtatttggatttggaaaagaaaatttgtgagtatatcagatcatattataaagatgatataagttactttgaaacaggatttccaatcactatagaaaatgctctagtcgcatctcttaatccaaatatgatatgtgattttgtaactgactttagacgtagaaaacggatgggattcttcggtaacttggaggtaggtattactttagttagggatcacatgaatgaaattcgcattaatattggagcgggaagattagtcagaccattcttggttgtggataacggagagctcatgatggatgtgtgtccggagttagaaagcagattagacgacatgacattctctgacattcagaaagagtttccgcatgtcatcgaaatggtagatatagaacaatttacttttagtaacgtatgtgaatcggttcaaaaatttagaatgatgtcaaaggatgaaagaaagcaatacgatttatgtgactttcctgccgaatttagagatggatatgtagcatcttcactagtgggaatcaatcacaattctggacccagagctattcttggatgtgctcaagctaaacaagctatctcttgtctgagctcggatatacgaaataaaatagacaatggaattcatttgatgtatccagagaggccaatcgtgattagtaaggctttagaaacttcaaagattgcggctaattgcttcggccaacatgttactatagcattaatgtcgtacaaaggtatcaatcaagaggatggaattatcatcaaaaaacaatttattcagagaggcggtctcgatattgttacagccaagaaacatcaagtagaaattccgttggaaaactttaataacaaagaaagagataggtctaacgcctattcaaaattagaaagtaatggattagttagactgaatgctttcttggaatccggagacgctatagcacgaaatatctcatcaagaactcttgaagatgattttgctagagataatcagattagctttgatgtttccgaaaaatataccgatatgtacaaatctcgcgttgaacgagtacaagtagaacttactgacaaagttaaggtacgagtattaaccatgaaagaaagaagacccattctaggagacaaatttaccactagaacgagtcaaaagggaacagtcgcgtatatcgcggatgaaacggaacttccatacgatgaaaatggtatcacaccagatgtcattattaattctacatccatcttctctagaaaaactatatctatgttgatagaggttattttaacagccgcatattctgctaagccgtacaacaataagggagaaaaccgacctgtctgttttcctagtagtaacgaaacatccatcgatacatatatgcaattcgctaaacaatgttatgagcattcaaatccgaaattgtctgatgaagaattatcggataaaatcttttgtgaaaagattctctatgatcctgaaacggataagccttatgcatccaaagtattttttggaccaatttattacttgcgtctgaggcatttaactcaggacaaggcaaccgttagatgtagaggtaaaaagacgaagctcattagacaggcgaatgagggacgaaaacgtggaggaggtatcaagttcggagaaatggagagagactgtttaatagcgcatggtgcagccaatactattacagaagttttgaaagattcggaagaagattatcaagatgtgtatgtttgtgaaaattgtggagacatagcagcacaaatcaagggtattaatacatgtcttagatgttcaaaacttaatctctctcctctcttaacaaaaattgataccacgcacgtatctaaagtatttcttactcaaatgaacgccagaggcgtaaaagttaaattagatttcgaacgaaggcctccttcgttttataaaccattagataaagttgatctcaaaccgtcttttctggtgtaatattctagtttggtagtagatacatatcaatatcatcaaattcgagatccgaattataaaatgggcgtggattgttaactatagaatcggacgtctgatattcgaaaatctgtggagttttaggttttggtggaggtgtaactgctacttgggatactgaagtctgatattcagaaagctgggggatgttctggttcgacatccaccgatggtgtcacatcactaatcggttcggtaacgtctgtggacgatggaggcaccacttctacaggttctggttctttatcctcagtcatcaacggagctacttcaatgcgaggaaatgtataatttggtaatggtttctcatgtggatctgaagaagaggtaagatatctactagaaagataccgatcacgttctagttctcttttgtagaacttaactttttctttctccgcatctagttgatattccaacctcttcacgttcgcatgggttacctccgcagtttttacgagcgatttcacgttcagccttcatgcgtcttatagcatgaattcgcttatcgttatcgggtttagcttctgtcaccttagcaattccttttttattaaactctacataatcatatccatttctattgtttgttctaatataaacgagtatagcatcattgctaaatttttcaatagtatcgaaaacagaatatcctaaaccatataatatatattcaggaacactcaaactaaatgtccaggattctcctaaatacgtaaactttaatagtgcgaaatcattcaaaaatctaccacttatagatagatagatagtacataaatgcgtatagtagtctacctatctctttattatgaaaaccggcattacgatcatatatgtcgtgatatacctgtgatccgtttacgttaaaccataaatacatgggtgatcctataaacatgaatttatttctaattctcagagctatagttaattgaccgtgtaatatttgcttacatgcatacttgatacgatcattaataagatttttatcattgctcgttatttcagaatcgtatatataaggagtaccatcgtgattcttaccagatattatacaaaatactatatataaaatatattgacccacgttagtaatcatgtaaatgtttaacgttttaaattttgtattcaatgatccattatcatacgctagcatggtcttatgatattcattctttaaaatataatattgtgttagccattgcattggggctcctaatggagattttttattctcatccattttaggataggctttcataaagtccctaataacttcgtgaataatgtttctatgttttctactgatgcatgtatttgcttcgatttttttatcccatgtttcatctatcatagatttaaacgcagtaatgctcgcaacattaacatcttgaaccgttggtacaattccgttccataaatttataatgttcgccatttatataactcattttttgaatatacttttaattaacaaaagagttaagttactcatatggacgccgtccagtctgaacatcaatctttttagccagagatatcatagccgctcttagagtttcagcgtgattttccaacctaaatagaacttcatcgttgcgtttacaacacttttctatttgttcaaactttgttgttacattagtaatctttttttccaaattagttagccgttgtttgagagtttcctcattgtcgtcttcatcggctttaacaattgcttcgcgtttagcctctggctttttagcagccgttgtagaaaaaaattcagttgctggaattgcaagatcgtcatctccggggaaaagagttccgtccatttaaagtacagattttagaaactgacactctgcgttatttatatttggtacaacacatggattataaatattgatgttaataacatcagaaaatgtaaagtctatacattgttgcatcgtgttaaattttctaatggatctagtattattgggtccaacttctgcctgaaatccaaatatggaagcggatacaaaaccgtttcctggataaaccacacatctccacttttgctttacatcagaaattgtgtcgttgacatcttgaactctcctatctaatgccggtgttccacctatagattttgaatattcgaatgctgcatgagtagcattaaattccttaatattgccataattttcatatattgagtaaccctggataaaaagtaaacacaccgcagccgtagctaccacaataaaaaaaattgatagagagttcatttataatctattagaagctgacaaaatttttttacacgcatcagacaatgctttaataaatagttcaacatctacttttgtcatatcgaaccgatggtatgattctaacctagaattacatccgaaaaagttgactatgttcatagtcattaagtcattaacaaacaacattccagactctggattataagacgatactgtttcgtcacaattacctaccttaatcatgtgattatgaatattggctattagagcaccttctaagaaatctataatatctttgaaacacgatttaaaatcaaaccacgaatatacttctacgaagaaagttagtttacccataggagaaataactataaatggagatctaaatacaaaatccggatctatgatagttttaacattattatattctctattaaatacctccacatctaaaaatgttaattttgaaactatgtcttcgtttattaccgtacctgaactaaacgctataagctctattgtttgagaactctttaaacgatattcttgaaatacatgtaacaaagtttcctttaactcggtcggtttatctaccatagttacagaatttgtatccttatctataatataataatcaaaatcgtataaagttatataattatcgcgttcagattgggatcttttcaaatagactaaaaaccccatttctctagtaagtatcttatgtatatgtttgtaaaatatcttcatggtgggaatatgctctaccgcagttagccattcctcattgacagcggtagatgtattagacaaaactattccaatgtttaacaagggccattttacgagattattaaatccttgtttgataaatgtagccaatgagggttcgagttcaacgacgattgaattctcttcccgcggatgctgcatgatgaacgacgggatgttgttcgattgatttggaattctttttcgactttttgtttatattaaatattttaaaatttatagcggatagcaattcatgtaccacggataatgtagacgcgtattgcgcatcgatatctttattattagataaatttatcaataaatgtgagaagtttgcctcgttaaggtcttccatttaaatattatataaacatttgtgtttgtatcttattcgtcttttatggaatagttttttactagtaaagctgcaattacacactttgtccgtaaaacataaatataaacaccagcttttatcaatcgttccaaaaagtcgacggcggacatttttaacatggcatctattttaaatacacttaggtttttggaaaaaacatcattttataattgtaacgattcaataactaaagaaaagattaagattaaacataagggaatgtcatttgtattttataagccaaagcattctaccgttgttaaatacttgtctggaggaggtatatatcatgatgatttggttgtattggggaaggtaacaattaatgatctaaagatgatgctattttacatggatttatcatatcatggagtgacaagtagtggaacaatttacaaattgggatcgtctatcgatagactttctctaaataggactattgttacaaaagttaataattataattatgatacattttttgacgatgatgattgatcgctattgcacaattttgtttttttactttctaatatagcgtttagattctttttcatgtgcgaatattgatttactaaaatatctatgtttaacttttgttctataacgtccttatcggcggtatcggtacatatacgtaattcaccttcacaaaatacggagtcttcgataataatagccaatcgattattggatctagctgtctgtatcatattcaacatgtttaatatatcctttcgtttcccctttacaggcatcgatcgtagcatattttccgcgtctgagatggaaatgttaaaactacaaaaatgcgtaatgttagcccgtcctaatattggtacgtgtctataagtttggcatagtagaataatagacgtgtttaaatgccttccaaagtttaagaattctattagagtattgcattttgatagtttatcgcctacatcatcaaaaataagtaaaaagtgtgctgattttttatgattttgtgcgacagcaatacatttttctatgttacttttagttcgtatcagattatattctagagattcctgactactaacgaaattaatatgatttggccaaatgtatccatcataatctggattataaacgggtgtaaacaagaatacatgtttatattttttaactagtgtagaaaacagagatagtaaatagatagtttttccagatccagatcctcccgttaaaaccattctaaacggcatttttaataaattttctcttgaaaattgtttttcttggaaacaattcataattatatttacagttactaaattaatttgataataaatcaaaatatggaaaactaaggtcgttagtagggaggagaacaaagaaggcacatcgtgacataaataacatttattatcatgatgacaccagaaaacgacgaagagcagacatctgtgttctccgctactgtttacagagacaaaattcagggaaagaataaacgcaaacgcgtgattggtctatgtattagaatatctatggttatttcactactatctatgattaccatgtccgcgtttctcatagtgcgcctaaatcaatgcatgtctgctaacgaggctgctattactgacgccgctgttgccgttgctgctgcatcatctactcatagaaaggttgcgtctagcactacgcaatatgatcacaaagaaagctgtaatggtttatattaccagggttcttgttatatattacattcagactaccagttattctcggatgctaaagcaaattgcactgcggaatcatcaacactacccaataaatccgatgtcttgactacctggctcattgattatgttaaggatacatggggatctgatggtaatccaattacaaaaactacatccgattatcaagattctgatgtatcacaagaagttagaaagtatttttgtgttaaaacaatgaactaatatttatttttgtacattaataaatgaaatcgcttaatagacaaactgtaagtaggtttaagaagttgtcggtgccggtcgctataatgatgatactctcaaccattattagtggcataggaacatttctgcattacaaagaagaactgatgcctagtgcttgcgccaatggatggatacaatacgataaacattgttatttagatactaacattaaaatgtctacagataatgcggtttatcagtgtcgtaaattacgagccagattgcctagaccggatactagacatctgagagtattgtttagtattttttataaagattattgggtaagtttaaaaaagaccaatgataaatggttagatattaataatgataaagatatagatattagtaaattaacaaattttaaacaactaaacagtacgacggatgctgaagcgtgttatatatacaagtctggaaaactggttaaaacagtatgtaaaagtactcaatctgtactatgtgttaaaaaattctacaagtgacaacaaaaaatgaattaataataagtcgttaacgtacgccgccatggacgccgcgtttgttattactccaatgggtgtgttgactataacagatacattgtatgatgatctcgatatctcaatcatggactttataggaccatacattataggtaacataaaaactgtccaaatagatgtacgggatataaaatattccgacatgcaaaaatgctactttagctataagggtaaaatagttcctcaggattctaatgatttggctagattcaacatttatagcatttgtgccgcatacagatcaaaaaataccatcatcatagcatgcgactatgatatcatgttagatatagaagataaacatcagccattttatctattcccatctattgatgtttttaacgctacaatcatagaagcgtataacctgtatacagctggagattatcatctaatcatcaatccttcagataatctgaaaatgaaattgtcgtttaattcttcattctgcatatcagacggcaatggatggatcataattgatgggaaatgcaatagtaattttttatcataaaagttgtaaagtaaataataaaacaataaatattgaactagtagtacgtatattgagcaatcagaaatgatgctggtacctcttatcacggtgaccgtagttgcgggaacaatattagtatgttatatattatatatttgtaggaaaaagatacgtactgtctataatgacaataaaattatcatgacaaaattaaaaaagataaagagttctaattccagcaaatctagtaaatcaactgatagcgaatcagactgggaggatcactgtagtgctatggaacaaaacaatgacgtagataatatttctaggaatgagatattggacgatgatagcttcgctggtagtttaatatgggataacgaatccaatgttatggcgcctagcacagaacacatttacgatagtgttgctggaagcacgctgctaataaataatgatcgtaatgaacagactatttatcagaacactacagtagtacttaatgaagataccaaacagaatcctaactattcatccaatcctttcgtaaattataataaaaccagtatttgtagcaagtcaaatccgttcattacagaactcaacaataaatttagtgagaataatccgtttagacgagcacatagcgatgattatcttaataagcaagaacaagatcatgaacacgatgatatagaatcattggtgtgattagtttcctttttataaaattgaagtaatatttagtattattgctgccgtcacgttgtacaaatggagatattccctgtattcggcatttctaaaattagcaattttattgctaataatgactgtagatattatatagatacagaacatcaaaaaattatatctgatgagatcaatagacagatggatgaaacggtacttcttaccaacatcttaagcgtagaagttgtaaatgacaatgagatgtaccatcttattcctcatagattatcgacgattatactctgtattagttctgtcggaggatgtgttatctctatagataatgacgtcaatggcaaaaatattctaacctttcccattgatcatgctgtaatcatatccccactgagtaaatgtgtcgtagttagcaagggtcctacaaccatattggttgttaaagcggatatacctagcaaacgattggtaacatcgtttacaaacgacatactgtatgtaaacaatctatcactgattaattattcgccgttgtctgtattcattattagacgagttaccgactatttggatagacacatatgcgatcagatatttgcgaataataagtggtattccattataaccatcgacaataagcagtttcctattccatcaaactgtataggtatgtcctctgccaagtacataaattctagcatcgagcaagatactttaatacatgtttgtaacctcgagcatccattcgacttagtatacaaaaaaatgcagtcgtacaattctgtacctatcaaggaacaaatattgtacggtagaattgataatataaatatgagcattagtatttctgtggattaatagatttctagtatggggatcattaatcatctctaatctctaaatacctcataaaacgaaaaaaaagctattatcaaatactgtacggaatggattcattctcttctctttttatgaaactctgttgtatatctactgataaaactggaagcaaaaaatctgataaaaagaataagaataagatcaaggattattataaaataacaatagttcctggttcctcttccacgtctactagctcgtggtattatacacatgcctagtaatagtctctttgcgttgacggaaagcagactagaaataacaggctaaaatgttcagacaccataatagttcccaacccagataataacagagtaccatcaacacattcctttaaactcaatcccaaacccaaaaccgttaaaatgtatccggccaattgatagtagataatgaggtgtacagcgcatgatgatttacacagtaaccaaaatgaaaatactttagtaattataagaaatatagatggtaacgtcatcatcaacaatccaataatatgccggagagtaaacattgacggataaaacaaaaatgctccgcataactctatcatggcaataacacaaccaaatacttgtaagattcctaaattagtagaaaatacaacggatatcgatgtataagtgatctcgagaaataataagaataaagtaatgcccgtaaagataaacatcaacattgtttggtaatcattaaaccaattagtatgaagttgaactaatttcacagtagattttattccagtattatccccgcatgtataagtacctggtaagatatctttatattccataatcaatgagacatcactatctgataacgaatgaagtctagcactagtatgccatttacttaatattgtcgtcttggaagttttattataagttaaaatatcatggttatccaatttccatctaatatactttgtcggattatctatagtacacggaataatgatggtatcattacatgctgtatactctatggtctttgtagttgttataacaaccaacgtatagaggtatatcaacgatattctaactcttgacattttttatttatttaaaatgatacctttgttatttattttattctattttgctaacggtattgaatggcataagtttgaaacgagtgaagaaataatttctacttacttattagacgacgtattatacacgggtgttaatggggcggtatacacattttcaaataataaactaaacaaaactggtttaactaataataattatataacaacatctataaaagtagaggatgcggaaccaataacggaaatcccaaatgttggaaaatagacggttcagacgacccaaaacatagaggtagaggatacgctccttatcaaaatagcaaagtaacgataatcagtcacaacggatgtgtactatctgacataaacatatcaaaagaaggaattaaacgatggagaagatttgacggaccatgtggttatgatttatacacggcggataacgtaattccaaaagatggtttacgaggagcattcgtcgataaagatggtacttatgacaaagtttacattcttttcactgatactatcggctcaaagagaattgtcaaaattccgtatatagcacaaatgtgcctaaacgacgaaggtggtccatcatcattgtctagtcatagatggtcgacgtttctcaaagtcgaattagaatgtgatatcgacggaagaagttatagacaaattattcattctagaactataaaaacagataatgatacgatactatatgtattcttcgatagtccttattccaagtccgcattatgtacctattctatgaataccattaaacaatctttttctacgtcaaaattggaaggatatacaaagcaattgccgtctccagctcctggtatatgtttaccagctggaaaagttgttccacataccacgtttgaagtcatagaaaaatataatgtactagatgatattataaagcctttatctaaccaacctatcttcgaaggaccgtctggtgttaaatggttcgatataaaggagaaggaaaatgaacatcgggaatatagaatatacttcataaaagaaaattctatatattcgttcgatacaaaatctaaacaaactcgtagctcgcaagtcgatgcgcgactattttcagtaatggtaacttcgaaaccgttatttatagcagatatagggataggagtaggaatgccacaaatgaaaaaaatacttaaaatgtaatcttaatcgagtacaccgcacgacaatgaacaaacataagacagattatgctggttatgcttgctgcgtaatatgcggtctaattgttggaattatttttacagcgacactattaaaagttgtagaacgtaaattagttcatacaccatcaatagataaaacgataaaagatgcatatattagagaagattgtcctactgactggataagctataataataaatgtatccatttatctactgatcgaaaaacctgggaggaaggacgtaatgcatgcaaagctctaaatccaaattcggatctaattaagatagagactccaaacgagttaagttttttaagaagcattagacgcggatattgggtaggagaatccgaaatattaaaccagacaaccccatataattttatagctaaaaatgccacgaagaatggaactaaaaaacggaaatatatttgtagtacaacgaatactcccaaactacatttttatcataccactacttcggttagatgttttagaaaaaaataaatatcgccgtaccgttcttgtttttataaaaataacaattaacaattatcaaattttttctttaatattttacgtggttgaccattcttggtggtaaaataatctcttagtgttggaatggaatgctgtttaatgtttccgcactcatcgtatattttgacgtatgcagtcacatcgtttacgcaatagtcagactgtagttctatcatgcttcctacatcagaaggaggaacagttttaaagtctcttggttttaatctattgccattagttttcatgaaatcctttgttttatccacttcacattttaaataaatgtccactatacattcttctgttaattttactagatcgtcatgggtcatagaatttataggttccgtagtccatggatccaaactagcaaacttcgcgtatacggtatcgcgattagtgtatacaccaactgtatgaaaattaagaaaacagtttaataaatcaacagaaatatttaatcctccgtttgatacagatgcgccatatttatggatttcggattcacacgttgtttgtctgaggtgttcgtctagtgttgcttctacgtaaacttcgattcccatatattctttattgtcagaatcgcataccgatttatcatcatacactgtttgaaaactaaatggtatacacatcaaaataataaataataacgagtacattctgcaatattgttatcgtaattggaaaaatagtgttcgagtgagttggattatgtgagtattggattgtatattttattttatattttatattttgtagtaagaatagaatgctaatgtcaagtttattccaatagatgtcttattaaaaaacatatataataaataacaatggctgaatggcataaaattatcgaggatatctcaaaaaataataagttcgaggatgccgccatcgttgattacaagactacaaagaatgttctagctgctattcctaacagaacatttgccaagattaatcctctcatcactaatcgtaatattctaaaacctcttattggtcagaaatattgtattgtatatactaactctctaatggatgagaacacgtatgctatggagttgcttactgggtacgcccctgtatctccgatcgttatagcgagaactcataccgcacttatatttttgatgggtaagccaacaacatccagacgtgacgtgtatagaacgtgtagagatcacgctacccgtgtacgtgcaactggtaattaaaataaaaagtaatattcatatgtagtgtcaattttaaatgatgatgatgaaatggataatatccatattgacgatgtcaataatgccggtattggcatacagttcatcgatttttagatttcattcagaggatgtggaattatgttatgggcatttgtattttgataggatctataatgtagtaaatataaaatataatccgcatattccatatagatataattttattaatcgcacgttaaccgtagatgaactagacgataatgtcttttttacacatggttattttttaaaacacaaatatggttcacttaatcctagtttgattgtctcattatcaggaaacttaaaatataatgatatacaatgctcagtaaatgtatcgtgtctcattaaaaatttggcaacgagtacatctactatattaacatctaaacataagacttattctctacatcggtccacgtgtattactataataggatacgattctattatatggtataaagatataaatgacatctatgattttactgcaatatgtatgctaatagcgtctacattgatagtgaccatatacgtgtttaaaaaaataaaaatgaactcttaattatgctatgctattagaaatggataaaatcaaaattacggttgattcaaaaattggtaatgttgttaccatatcgtataacttggaaaagataactattgatgtcacacctaaaaagaaaaaagaaaaggatgtattattagcgcaatcagttgctgtcgaagaggcaaaagatgtcaaggtagaagaaaaaaatattatcgatattgaagatgacgatgatatggatgtagaaagcgcataatacgatctataaaaataagtatataaatactttttatttactgtactcttactgtgtagtggtgataccctactcgattatttttttaaaaaaaaatacttattctgattcttctagccatttccgtgttcgttcgaatgccacatcgacgttaaagataggggagtagttgaaatctagttctgcattgttggtacgcacctcaaatgtagtgttggatatcttcaacgtatagttgttgagtagtgatggttttctaaatagaattctcttcatatcattcttgcacgcgtacatttttagcatccatcttggaatcctagatccttgttctattcccaatggtttcatcaatagaagattaaacatatcgtacgaacacgatggagagtaatcgtagcaaaagtaagcatttcctttaatctcagatcccggatactggatatattttgcagccaacacgtgcatccatgcagcatttcctacatatacccggctatgtaccgcgttatcatcgactgtacgatacataatgttaccgtgttgcttacattgctcgtaaaagactttcatcaatttgtctccttctccgtaaattccagtgggtcttaggcaacaagtatacaattttgctccattcatgattacggaattattggctttcataaccagttgctcggccatacgtttactttttgcgtatacatgtcctggtgatatatcataaagggtatgctcatggccgatgaatggatcaccgtgtttattgggtcctattgcttccatgctactagtatagatcaaatacttgattcctaggtccacacaagctgccaatatagtctgtgttccataatagtttactttcatgatttcattatcggtgtattttccaaatacatccactagagcagctgtatgaataatcagatttaccccatctagcgcttctcttaccttatcaaagtcgtttatatcacattgtatatagtttataaccttaactttcgaggttattggttgtggatcttctacaatatctatgactctgatttcttgaacatcatctgcactaattaacagttttactatatacctgcctagaaatccggcaccaccagtaaccgcgtacacggccattgctgccactcataatatcagactacttattctattttactaaataatggctgtttgtataatagaccacgataatatcagaggagttatttactttgaaccagtccatggaaaagataaagttattggattaaaatccggaacgtatagtttgataattcatcgttacggagatattagtcaaggatgtgattccataggcagtccagaaatatttatcggtaacatctttgtaaacagatatggtgtagcatatgtttatttagatacagatgtaaatatatctacaattattggaaaggcgttatctatttcaaaaaatgatcagagattagcgtgtggagttattggtatttcttacataaatgaaaagataatacattttcttacaattaacgagaatggcgtttgatatatcagttaatgcgtctaaaacaataaatgcattagtttacttttctactcagcaaaataaattagtcatacgtaatgaagttaatgatacacactacactgtcgaatttgatagggacaaagtagttgacacgtttatttcatataatagacataatgactccatagagataagaggggtgcttccagaggaaactaatattggttgcgcggttaatacgccggttagtatgacttacttgtataataagtatagttttaaactgattttagcagaatatataagacacagaaatactatatccggcaatatttattcggcattgatgacactagatgatttggctattaaacagtatggagacattgatctattatttaatgagaaacttaaagtagactccgattcgggactatttgactttgtcaactttgtaaaggatatgatatgttgtgattctagaatagtagtagctctatctagtctagtatctaaacattgggaattgacaaataaaaaatataggtgtatggcattagccgaacatatatctgatagtattccaatatctgagctatctagactacgatacaatctatgtaagtatctacgcgggcacactgagagcatagaggatgaatttgattattttgaagacgatgattcgtctacatgttctgccgtaaccgacagggaaacggatgtataattttttttatagcgtgaaggatatgataaaaaatataattgttgtatttatcccattccaatcaccttatatgattctgtaacacaatgaaggagtcttatagatgtatagaggtcagatactggtttgataaactgtttattccacataagtatgtttgactttatggttagacccgcatactttaacaaatcactgaaaattggagttaggtattgacctctcagaatcagttgccgttctggaacattaaatgtattttttatgatatactccaacgcatttatgtgggcatacaacaagtcattactaatggagtattccaagagaagagatttcaacagactgtttatgaactcgaatgccgcctcattgtcgcttatattgatgatgtcgaattctcccaatatcatcaccgatgagtagctcatcttgttatcgggatccaagttttctaaagatgtcattaaaccctcgatcatgaatggatttatcatcatcgtttttatgttggacatgagcttagtccgtttgtccacatctatagacgacgatttctgaattatttcatatatccctctctttaactccaggaacttgtcaggatggtctactttaatatgttctcgtctaagagatgaaaatctttggatggttgcacgcgacttttctctaaaggatcctctcttaaatgaatccatcttatccttggacaagatggacagtctattttccttagatggtttaatatttttgttacccatgatctataaaggtagacctaatcgtctcggatgaccatatatttattttcagttttattatacgcataaattgtaaaaaatatgttaggtttacaaaaatgtctcgtggggcattaatcgtttttgaaggattggacaaatctggaaaaacaacacaatgtatgaacatcatggaatctataccggcaaacacgataaaatatcttaactttcctcagagatccactgtcactggaaagatgatagatgactatctaactcgtaaaaaaacctataatgatcatatagttaatctattattttgtgcaaatagatgggagtttgcatcttttatacaagaacaactagaacagggaattactttaatagttgatagatacgcattctctggagtagcgtatgccgccgctaaaggcgcgtcaatgactctcagtaagagttatgaatctggattgcctaaacccgacttagttatattcttggaatctggtagcaaagaaattaatagaaacgtcggcgaggaaatttatgaagatgttacattccaacaaaaggtattacaagaatataaaaaaatgattgaagaaggagatattcattggcaaattatttcttctgaattcgaggaagatgtaaagaaggagttgattaagaatatagttatagaggctatacacacggttactggaccagtggggcaactgtggatgtaatagtgaaattacattttttataaatggatgaagcatattactctggcaacttggaatcagtactcggatacgtgtccgatatgcataccgaactcgcatcaatatctcaattagttattgccaagatagaaactatagataatgatatattaaacaaggacattgtaaattttatcatgtgtagatcaaacttggataatccatttatctctttcctagatactgtatatactattatagatcaagagatctatcagaccgaattgattaattcattagacgacaatgaaattatcgattgtatagttaacaagtttatgagcttttataaggataacctagaaaatatagtagatgctatcattactctaaaatatataatgaataatccagattttaaaactacgtatgccgaagtactcggttccagaatagcggatatagatattaaacaagtgatacgtgagaatatactacaattgtctaataatatccgcgaacgatatttgtgaaaatattaaaaaaaaatactttttttattaaatgacgtcgcttcgcgaatttagaaaattatgctgtgatatatatcacgcatcaggatataaagaaaaatctaaattaattagagactttataacagatagggatgataaatatttgatcattaagctattgcttcccggattagacgatagaatttataacatgaacgataaacaaattataaaattatatagtataatatttaaacaatctcaggaagatatgctacaagatttaggatacggatatataggagacactattaggactttcttcaaagagaacacagaaatccgtccacgagataaaagcattttaactttagaagaagtggatagttttttaactacgttatcatccgtaactaaagaatcgcatcaaataaaattattgactgatatcgcatccgtttgtacatgtaatgatttaaaatgtgtagtcatgcttattgataaagatctaaaaattaaagcgggccctcggtacgtacttaacgctattagtcctcatgcctatgatgtgtttagaaaatctaataacttgaaagagataatagaaaatgcatctaaacaaaatctagactctatatctatttctgttatgactccaattaatcccatgttagcggaatcgtgtgattctgtcaataaggcgtttaaaaaatttccatcaggaatgtttgcggaagtcaaatacgatggtgaaagagtacaagttcataaaaataataacgagtttgccttctttagtagaaacatgaaaccagtactctctcataaagtggattatctcaaagaatacataccgaaagcatttaaaaaagctacgtctatcgtattggattctgaaattgttcttgtagacgaacataatgtaccgctcccgtttggaagtttaggtatacacaaaaagaaagaatataaaaactctaacatgtgtttgttcgtgtttgactgtttgtactttgatggattcgatatgacggacattccattgtacgaacgaagatcttttctcaaagatgttatggttgaaatacccaatagaatagtattctcagagttgacgaatattagtaacgagtctcagttaactgacgtattggatgatgcactaacgagaaaattagaaggattggtcttaaaagatattaatggagtatacgaaccgggaaagagaagatggttaaaaataaagcgagactatttgaacgagggttccatggcagattctgccgatttagtagtactaggtgcttactatggtaaaggagcaaagggtggtatcatggcagtctttctaatgggttgttacgacgatgaatccggtaaatggaagacggttaccaagtgttcaggacacgatgataatacgttaagggagttgcaagaccaattaaagatgattaaaattaacaaggatcccaaaaaaattccagagtggttagtagttaataaaatctatattcccgattttgtagtagaggatccaaaacaatctcagatatgggaaatttcaggagcagagtttacatcttccaagtcccataccgcaaatggaatatccattagatttcctagatttactaggataagagaggataaaacgtggaaagaatctactcatctaaacgatttagtaaacttgactaaatcttaatagttacatacaaattaaaataacactatttagttggtggtcgccatggatggtgttattgtatactgtctaaacgcgttagtaaaacatggcgaggaaataaatcatataaaaaatgatttcatgattaaaccatgttgtgaaaaagtcaagaacgttcacattggcggacaatctaaaaacaatacagtgattgcagatttgccatatatggataatgcggtatccgatgtatgcaattcactgtataaaaagaatgtatcaagaatatccagatttgctaatttgataaagatagatgacgatgacaagactcctactggtgtatataattattttaaacctaaagatgccattcctgttattatatccataggaaaggatagagatgtttgtgaactattaatctcatctgataaagcgtgtgcgtgtatagagttaaattcatataaagtagccattcttcccatggatgtttccttttttaccaaaggaaatgcatcattgattattctcctgtttgatttctctatcgatgcggcacctctcttaagaagtgtaaccgataataatgttattatatctagacaccagcgtctacatgacgagcttccgagttccaattggttcaagttttacataagtataaagtccgactattgttctatattatatatggttgttgatggatctgtgatgcatgcaatagctgataatagaacttacgcaaatattagcaaaaatatattagacaatactacaattaacgatgagtgtagatgctgttattttgaaccacagattaggattcttgatagagatgagatgctcaatggatcatcgtgtgatatgaacagacattgtattatgatgaatttacctgatgtaggcgaatttggatctagtatgttggggaaatatgaacctgacatgattaagattgctctttcggtggctggtatttggaaagttttataggtagttgatagaacaaaatacataattttgtaaaaataaatcactttttatactaatatgacacgattaccaatacttttgttactaatatcattagtatacgctacaccttttcctcagacatctaaaaaaataggtgatgatgcaactttatcatgtaatcgaaataatacaaatgactacgttgttatgagtgcttggtataaggagcccaattccattattcttttagctgctaaaagcgacgtcttgtattttgataattataccaaggataaaatatcttacgactctccatacgatgatctagttacaactatcacaattaaatcattgactgctagagatgccggtacttatgtatgtgcattctttatgacatcgcctacaaatgacactgataaagtagattatgaagaatactccacagagttgattgtaaatacagatagtgaatcgactatagacataatactatctggatctacacattcaccggaaactagttctgagaaacctgattatatagataattctaattgctcgtcggtattcgaaatcgcgactccggaaccaattactgataatgtagaagatcatacagacaccgtcacatacactagtgatagcattaatacagtaagtgcatcatctggagaatccacaacagacgagactccggaaccaattactgataaagaagaagatcatacagttacagacactgtctcatacactacagtaagtacatcatctggaattgtcactactaaatcaaccaccgatgatgcggatctttatgatacgtacaatgataatgatacagtaccatcaactactgtaggcggtagtacaacctctattagcaattataaaaccaaggactttgtagaaatatttggtattaccgcattaattatattgtcggccgtggcaatattctgtattacatattatatatataataaacgttcacgtaaatacaaaacagagaacaaagtctagatttttgacttacataaatgtctgggatagtaaaatctatcatattgagcgggccatctggtttaggaaagacagccatagccaaaagactatgggaatatatttggatttgtggtgtcccataccactagatttcctcgtcctatggaacgagaaggtgtcgattaccattacgttaacagagaggccatctggaagggaatagccgccggaacatactgagtttttaggaaatatttacggaacttctaaaactgctgtgaatacagcggctattaataatcgtatttgtgtgatggatctaaacatcgacggtgttagaagttttaaaaatacttacctaatgccttactcggtgtatataagacctacctctcttaaaatggttgagaccaagcttcgttgtagaaacactgaagcggatgatgagattcatcgtcgtgtgatgttggcaaaaactgacatggatgaggcaggtgaagccggtctattcgacactattatcattgaagatgatgtgaatttagcatatagtaagttaattcagatactacaggaccgtattagaatgtattttaacactaattagagacttaagacttaaaacttgataattaataatataactcgtttttatatgtggctatttcaacgtctaatgtattagttaaatattaaaacttaccacgtaaaacttaaaatttaaaatgatatttcattgacagatagatcacacattatgaactttcaaggacttgtgttaactgacaattgcaaaaatcaatgggtcgttggaccattaataggaaaaggtggatttggtagtatttatactactaatgacaataattatgtagtaaaaatagagcccaaagctaacggatcattatttaccgaacaggcattttatactagagtacttaaaccatccgttatcgaagaatggaaaaaatctcacaatataaagcacgtaggtcttatcacgtgcaaggcatttggtctatacaaatccattaatgtggaatatcgattcttggtaattaatagattaggtgcagatctagatgcggtgatcagagccaataataatagattaccaaaaaggtcggtgatgttgatcggaatcgaaatcttaaataccatacaatttatgcacgagcaaggatattctcacggagatattaaagcgagtaatatagtcttggatcaaatagataagaataaattatatctagtggattacggattggtttctaaattcatgtctaatggcgaacatgttccatttataagaaatccaaataaaatggataacggtactctagaatttacacctatagattcgcataaaggatacgttgtatctagacgtggagatctagaaacacttggatattgtatgattagatggttgggaggtatcttgccatggactaagatatctgaaacaaagaattgtgcattagtaagtgccacaaaacagaaatatgttaacaatactgcgactttgttaatgaccagtttgcaatatgcacctagagaattgctgcaatatattaccatggtaaactctttgacatattttgaggaacccaattacgacaagtttcggcacatattaatgcagggtgtatattattaagtgtggtgtttggttgatgtaaaatttttgtcgataaaaattaaaaaataacttaatttattattgatctcgtgtgtacaaccgaaatcatggcgatgttttacgcacacgctctcggtgggtacgacgagaatcttcatgcctttcctggaatatcatcgactgttgccaatgatgtcagtttataataacaagtatgacattgtaaaagacaaatatatgtggtgttacagtcaggtgaacaagagatatattggagcactgctgcctatgtttgagtgcaatgaatatctacaaattggagatccgatccatgatcaagaaggaaatcacatatcgccacaaaaactactatgctctaagcggaatcgggtacgagagtctagacttgtgtttggaaggagtagggattcatcatcacgtacttgaaacagaaaacgctgtatatggaaaagttcaacatgattattctactatcaaagagaaggccaaagaaatgaatgcactcagttcaggacctatcatcgattaccacgtctggataggagattgtatctgtcaagttactgctgtggacgtacatggaaaggaaattatgagaatgagattcaaaaagggtgcggtgcttccgatcccaaatctggtaaaagttaaacttggggagaatgatacagaaaatctttcttctactatatcggcggcaccatcgaggtaaccacctctctggaagacagtgtgaatcatgtactcatgaaacgtttggaatctatacgccatatgtggtctgttgtatatgatcattttgatattgtgaatggtaaagaatgctgttatgtgcatacgcatttgtctaatcaaaatcttataccgagtactgtaaaaacaaatttgtacatgaagactatgggatcatgcattcaaatgagtatcttagcgaactgaaggaatcaggtggatggagtcccagaccagaaatgcaggaatttgaatatccagatggagtggaagacactgaatcaattgagagattggtagaggagttcttcaatagatcagaacttcaggctggtaaatctattaatgttaaacatacatctgtttcagctaagcaactaagaacacgtatactctcatcttttgccaacacagagggtggatatttgttcattggagttgataataatacacacaaagtatttggattcacggtgggttacgactacctcagactgatagagaatgatatagaaaagcatatcaaaagactttgtgttgtgtatttctgtgagaagaaagaggacatcaagtacacgtgtcgattcatcaaggtatataaacctggggatgaggctacctcgacatacgtgtgcgctatcaaagtggaaagatgctgttgtgctgtgtttgcagattggccagaatcatggtatcaagaagtattctccagatgaataggtgtcacatataaaattttaattaatgtaactatagagaacaaataataggttgtaatatcatatagacaataactaacaattaattagtaactgttatctctttttaactaactaactatacctattaatacatcgtaattatagttcttaacatctattaatcattgattcgcttctttaattttttataaaccaacattgttaattgaaaagggataacatgttacagaatataaattatatatggattttttttaaaaaggaaatacttgactggagtgtatatttatctcttcattatatagcacgcgtgttttccaatttttccacatcccatataatacaggattataatctcgttcgaacatacgagaaagtggataaaacaatagttgattttttatctaggttgccaaatttattccatattttagaatatggggaaaatattctacatatttattctatggatgatgctaatacgaatattataattttttttctagatagagtattaaatattaataagaacgggtcatttatacacaatctcaggttatcatcatccattaatataaaagaatatgtatatcaattagttaataatgatcatccagataataggataagactaatgcttgaaaatggacgtagaacaagacattttttgtcctatatatcagatacagttaatatctatatatgtattttatatagatgccgaagacagttacggttgtacattattacatagatgtatatatcactataagaaatcagaatcagaatcagaatcatacaatgaattaattaagatattgttaaataatggatcagatgtagataaaaaagatacgtacggaaacacaccttttatcctattatgtaaacacgatatcaacaacgtggaattgtttgagatatgtttagagaatgctaatatagactctgtagactttaatagatatacacctcttcattatgtctcatgtcgtaataaatatgattttgtaaagttattaatttctaaaggagcaaatgttaatgcgcgtaataaattcggaactactccattttattgtggaattatacacggtatctcgcttataaaactatatttggaatcagacacagagttagaaatagataatgaacatatagttcgtcatttaataatttttgatgctgttgaatctttagattatctattatccagaggagttattgatattaactatcgtactatttacgacgctgtcagttataatgcgtataatacgttggtctatctattaaacagaaatggtgattttgagacgattactactagtggatgtacatgtatttcggaagcagtcgcaaacaacaacaaaataataatggaagtactattgtctaaacgaccatctttgaaaattatgatacagtctatgatagcaattactaaacataaacagcataatgcagatttattgaaaatgtgtataaaatatactgcgtgtatgaccgattatgatactcttatagatgtacaatcactacagcaatataaatggtatattttaagatgtttcgatgaaatagatatcatgaagagatgttatataaaaaataaaactgtattccaattagttttttgtatcaaagacattaatactttaatgagatacggtaaacatccttctttcgtgaagtgcactagtctcgacgtatacggaagtcgtgtacgtaatatcatagcatctattagatatcgtcagagattaattagtctattatccaagaagctggatcctggagataaatggtcgtgttttcctaacgaaataaaatataacgataacgaactgtccacatatctaaaaatcttataaacactattaaaatataaaatcacactacatcattgtttccttttagtgctcgacagtgtatactatttttaacgctcataaataaaaatgaaaacgatttccgttgttacgttgttatgcgtactacctgctgttgtttattcaacatgtactgtacccactatgaataacgctaaattaacgtctaccgaaacatcgtttaataataaccagaaagttacgtttacatgtgatcagggatatcattcttcggatccaaatgctgtctgcgaaacagataaatggaaatacgaaaatccatgcaaaaaaatgtgcacagtttctgattacatctctgaactatataataaaccgctatacgaagtgaattccaccatgacactaagttgcaacggcgaaacaaaatattttcgttgcgaagaaaaaaatggaaatacttcttggaatgatactgttacgtgtcctaatgcggaatgtcaacctcttcaattagaacacggatcgtgtcaaccagttaaagaaaaatactcatttggggaatatataactatcaactgtgatgttggatatgaggttattggtgcttcgtacataagttgtacagctaattcttggaatgttattccatcatgtcaacaaaaatgtgatataccgtctctatctaatggattaatttccggatctacattttctatcggtggcgttatacatcttagttgtaaaagtggttttatactaacgggatctccatcatccacatgtatcgacggtaaatggaatcccatactcccaacatgtgtacgatctaacgaaaaatttgatccagtggatgatggtcccgacgatgagacagatttgagcaaactctcgaaagacgttgtacaatatgaacaagaaatagaatcgttagaagcaacttatcatataatcatagtggcgttaacaattatgggcgtcatatttttaatctccgttatagtattagtttgttcctgtgacaaaaataatgaccaatataagttccataaattgctaccgtgaatataaatccgttaaaataatgaataattaataattaataatttaataacaaacaagtatcaaaagattaaagacttatagctagaatcaattgagatgtcttcttcagtggatgttgatatctacgatgccgttagagcatttttactcaggcactattataacaagagatttattgtgtatggaagaagtaacgccatattacataatatatacaggctatttacaagatgcgccgttataccgttcgatgatatagtacgtactatgccaaatgaatcacgtgttaaacaatgggtgatggatacacttaatggtataatgatgaatgaacgcgatgtttctgtaagcgttggcaccggaatactattcatggaaatgtttttcgattacaataaaaatagtatcaacaatcaactaatgtatgatataattaatagcgtatctataattctagctaatgagagatatagaagcgcttttaacgacgatggtatatacatccgtagaaatatgattaacaagttgtacggatacgcatctctaactactattggcacgatcgctggaggtgtttgttattatctgttgatgcatctagttagtttgtataaataattatttcaatatactagttaaaattttaagattttaaatgtataaaaaactaataacgtttttatttgtaataggtgcattagcatcctattcgaataatgagtacactccgtttaataaactgagtgtaaaactctatatagatggagtagataatatagaaaattcatatactgatgataataatgaattggtgttaaattttaaagagtacacaatttctattattacagagtcatgcgacgtcggatttgattccatagatatagatgttataaacgactataaaattattgatatgtctactattcaacgcagaggtcacacgtgtagaatatctaccaaattatcatgccattatgataagtacccttatattcacaaatatgatggtgatgagcgacaatattctattactgcagagggaaaatgctataaaggaataaaatatgaaataagtatgatcaacgatgatactctattgagaaaacatactcttaaaattggatctacttatatatttgatcgtcatggacatagtaatacatattattcaaaatatgatttttaaaaatttaaaatatattatcacttcagtgacagtagtcaaataacaaacaacaccatgagatatattataattctcgcagttttgttcattaatagtatacacgctaaaataactagttataagtttgaatccgtcaattttgattccaaaattgaatggactggggatggtctatacaatatatcccttaaaaattatggcatcaagacgtggcaaacaatgtatacaaatgtaccagaaggaacatacgacatatccgcatttccaaagaatgatttcgtatctttctgggttaaatttgaacaaggcgattataaagtggaagagtattgtacgggaccaccgactgtaacattaactgaatacgacgaccatccgtatgctactagaggtagcaaaaagattcctatttacaaacgcggtgacatgtgtgatatctacttgttgtatacggctaacttcacattcggagattctaaagaaccagtaccatatgatatcgatgactacgattgcacgtctacaggttgcagcatagactttgtcacaacagaaaaagtgtgcgtgacagcacagggagccacagaagggtttctcgaaaaaattactccatggagttcgaaagtatgtctgacacctaaaaagagtgtatatacatgcgcaattagatccaaagaagatgttcccaatttcaaggacaaaatggccagagttatcaagagaaaatttaactaaatttctcggtagcacatcaaatgatgttaccacttttcttagcatgcttaacttgactaaatattcataactaatttttattaatgatacaaaaacgaaataaaactgcatattatacactggttaacgcccttataggctctaaccattttcaagatgaggtccctgattatagtccttctgttcccctctatcatctactccatgtctattagacgatgtgagaagactgaagaggaaacatggggattgaaaatagggttgtgtataattgccaaagatttctatcccgaaagaactgattgcagtgttcatctcccaactgcaagtgaaggcaatggattcagggatatacgaaacaccgataaattataaaaaaagcaatgtgtccgctgtttccgttaataatactattttcgtaactggcggattattcataaataactctaatagcacgatcgtggttaacaatatggaaaaacttgacatttataaagacaaacaatggtcgattatagaaatgcctatggctagggtatatcacggcatcgactcgacatttggaatgttatattttgccggaggtctatccgttaccgaacaatatggtaatttagagaaaaacaacgagatatcttgttacaatcctagaacgaataagtggtttgatatttcatatactatttataagatatccatatcatcattgtgtaaactaaataacgtcttctatgtatttagtaaggacattggatatgtggaaaagtatgatggtctccccgctataaaggcattatcaacttctccttattgattgaaaatgaaaatataaatagtttttatgtatagcagtattaccctatagttttattgcttactactaacatggatacagatacagatgttacaaatgtagaagatatcatgaatgaaatagatagagagaaagaagaaatactaaaaaatgtagaaattgaaaataataaaaacattaacaagaatcatcccaatgaatatattagagaagcactcgttattaatacaagtagtaatagtgattccattgataaagaagttatagaatgtatcagtcacgatgtaggaatatagatcatatctactaatttttataatcaatacaaaacataaaaaacaactcgttattacatagcaggcatggaatccttcaagtattgttttgataacgatggcaagaaatggattatcggaaatactttatattctggtaattcaatactctataaggtcagaaaaaatttcactagttcgttctacaattacgtaatgaagatagatcacaaatcacacaagccattgttgtctgaaatacgattctatatatctgtattggatcctttgactatcgacaactggacacgggaacgtggtataaagtatttggctattccagatctgtatggaattggagaaaccgatgattatatgttcttcgttataaagaatttgggaagagtattcgccccaaaggatactgaatcagtcttcgaagcatgcgtcactatgataaacacgttagagtttatacactctcgaggatttacccatggaaaaatagaaccgaggaatatactgattagaaataaacgtctttcactaattgactattctagaactaacaaactatacaagagtggaaactcacatatagattacaacgaggacatgataacttcaggaaatatcaattatatgtgtgtagacaatcatcttggagcaacagtttcaaaacgaggagatttagaaatgttgggatattgcatgatagaatggttcggtggcaaacttccatggaaaaacgaaagtagtataaaagtaataaaacaaaaaaaagaatataaaaaatttatagctactttctttgaggactgttttcctgaaggaaatgaacctctggaattagttagatatatagaattagtatacacgttagattattctcaaactcctaattatgacagactacgtagactgtttatacaagattgaaatattctttttttatagagtgtggtagtgttacggatatctaatattaatattagactatctctatcgcgctacacgaccaatatcgattactatggatatcttctatgaaaggagagaatgtattcatttctccagcgtcaatctcgtcagtattgacaatactgtattatggagctaatggatccactgctgaacagctatcaaaatatgtagaaaaggaggagaacacggataaggttagcgctcagaatatctcattcaaatccatgaataaagtatatgggcgatattctgccgtgtttaaagattcctttttgagaaaaattggcgataagtttcaaactgttgacttcactgattgtcgcactatagatgcaatcaacaagtgtgtagatatctttactgaggggaaaatcaatccactattggatgaacaattgtctcctagcaattagtgccgtatactttaaagcaaaatggttgacgccattcgaaaaggaatttaccagtgattatcccttttacgtatcaccaacggaaatggtagacgtaagtatgatgtctatgtacggcgagctatttaatcacgcatctgtaaaagaatcattcggtaacttttcaatcatagaactgccatatgttggagatactagtatgatggtcattcttccagacaagattgatggattagaatccatagaacaaaatctaacagatacaaattttaagaaatggtgtaactctctggaagctacgtttatcgatgttcacattcccaagtttaaggtaacaggctcgtataatctggtggatactctagtaaagtcaggactgacagaggtgttcggttcaactggagattatagcaatatgtgtaatttagatgtgagtgtcgacgctatgatccacaaaacgtatatagatgtcaatgaagagtatacagaagcagctgcagcaacttgtgcactggtgtcagactgtgcatcaacaattacaaatgagttctgtgtagatcatccgttcatctatgtgattaggcatgttgatggaaaaatttttttcgttggtagatattgctctccgacaactaattgttaaccattttttttaaaaaaatagaaaaaacatgtggtattagtgcaggtcgttattcttccaattgcaattggtaagatgacggccaactttagtacccacgtcttttcaccacagcactgtggatgtgacagactgaccagtattgatgacgtcaaacaatgtttgactgaatatatttattggtcgtcctatgcataccgcaacaggcaatgcgctggacaattgtattccacactcctctcttttagagatgatgcggaattagtgttcatcgacattcgcgagctggtaaaaaatatgccgtgggatgatgtcaaagattgtgtagaaatcatccgttgttatataccggatgagcaaaaaaccatcatcggactttgtgcatatgctgctacttactggggaggtgaagaccatcccactagtaacagtctgaacgcattgtttgtgatgcttgagatgctaaattacgtggattataacatcatattccggcgtatgaattgatgagttgtacatcttgacattttcttctttcttctcttctccctttcccagaaacaaactttttttacccactataaaataaaatgagtatactacctgttatatttctttctatatttttttattcttcattcgttcagacttttaacgcgcctgaatgtatcgacaaagggcaatattttgcatcattcatggagttagaaaacgagccagtaatcttaccatgtcctcaaataaatacgctatcatccggatataatatattagatattttatgggaaaaacgaggagcggataatgatagaattataccgatagataatggtagcaatatgctaattctgaacccgacacaatcagactctggtatttatatatgcattaccacgaacgaaacctactgtgacatgatgtcgttaaatttgacaatcgtgtctgtctcagaatcaaatatagatcttatctcgtatccacaaatagtaaatgagagatctactggcgaaatggtatgtcccaatattaatgcatttattgctagtaacgtaaacgcagatattatatggagcgggcatcgacgccttagaaataagagacttaaacaacggacacctggaattattaccatagaagatgttagaaaaaatgatgctggttattatacatgtgttttagaatatatatacggtggcaaaacatataacgtaaccagaattgtaaaattagaggtacgggataaaataataccttctactatgcaattaccagaaggtgttgtaacttcaataggtagtaatttgactattgcgtgtagagtatcgttgagacctcccacaacggatgcagacgtcttttggataagtaatggtatgtattacgaagaagatgatggggacggagacggtagaataagtgtagcaaataaaatctatatgaccgataagagacgtgttattacatcccggttaaacattaatcctgtcaaggaagaagatgctacaacgtttacgtgtatggcgtttactattcctagcatcagcaaaacagttactgttagtataacgtgaatgtatgttgttacatttccatgtcaattgagtttataagaatttttatacattatcttccaacaaacaattgacgaacgtattgctatgattaactcccacgatactatgcatattattaatcattaacttgcagactatacctagtgctattttgacatactcatgttcttgtgtaattgcggtatctatattattaaagtacgtaaatctagctatagttttattatttaattttagataatataccgtctccttatttttaaaaattgccacatcctttattaaatcatgaatgggaatttctatgtcatcgttaatatattgtgaacaacaagagcagatatctataggaaagggtggaatgcgatacattgatctatgtagttttaaaacacacgcgaactttgaagaatttatataaatcattccatcgatacatccttctatgttgacatgtatatatccaggaattcttttattaatgtcaggaaatgtataaactaaaacattgcccgaaagcggtgcctctatctgcgttatatccgttcttaacttacaaaatgtaaccaatacctttgcatgacttgttttgttcggcaacgttagtttaaacttgacgaatggattaattacaatagcatgatccgcgcatctattaagtttttttactttaacgcccttgtatgtttttacagagactttatctaaatttctagtgcttgtatgtgttataaatataacgggatatagaactgaatcacctaccttagatacccaattacattttatcagatccagataataaacaaattttgtcgccctaactaattctatattgttatatattttacaattggttatgatatcatgtaataacttggagtctaacgcgcatcgtcgtacgtttatacaattgtgatttagtgtagtatatctacacatgtatttttccgcactatagtattctggactagtgataaaactatcgttatatctgtcttcaatgaactcatcgagatattgctctctgtcatattcatacacctgcataaactttctagacatcttacaatccgtgttattttaggatcatatttacatatttacgggtatatcaaagatgttagattagttaatgggaatcgtctataataatgaatattaaacaattatatgaggacttttaccacaaagcatcataaaaatgagtcgtcgtctgatttatgttttaaatatcaaccgcgaatcaactcataaaatacaagagaatgaaatatatacatattttagtcattgcaatatagaccatacttctacagaacttgattttgtagttaaaaactatgatctaaacagacgacaacctgtaactgggtatactgcactacactgctatttgtataataattactttacaaacgatgtactgaagatattattaaatcatggagtggatgtaacgatgaaaaccagtagcggacgtatgcctgtttatatattgcttactagatgttgtaatatttcacatgatgtagtgatagatatgatagacaaagataaaaaccacttatcgcatagagactattccaacctactactagagtatataaaatctcgttacatgttattgaaggaagaggatatcgatgagaacatagtatccactttattagataagggaatcgatcctaactttaaacaagacggatatacagcgttacattattattatttgtgtctcgcacacgtttataaaccaggtgagtgtagaaaaccgataacgataaaaaaggccaagcgaattatttctttgtttatacaacatggagctaatctaaacgcgttagataattgtggtaatacaccattccatttgtatcttagtattgaaatgtgtaataatattcatatgactaaaatgctgttgacttttaatccgaatttcaaaatatgtaataatcatggattaacgcctatactatgttatataacttccgactacatacaacacgatattcttgttatgttaatacatcactatgaaacaaatgttggagaaatgccgatagatgagcgtcgtataatcgtattcgagtttatcaaaacatattctacacgtccggcagattcgataacttatttgatgaataggtttaaaaatatagatatttatacccgctatgaaggaaagacattattacacgtagcatgtgaatataataatacacacgtaatagattatcttatacgtatcaacggagatataaatgcgttaaccgacaataacaaacacgctacacaactcattatagataacaaagaaaattccccatataccattaattgtttactgtatatacttagatatattgtagataagaatgtgataagatcgttggtggatcaacttccatctctacctatcttcgatataaaatcatttgagaaattcatatcctactgtatacttttagatgacacattttacaatagacacgttaggaatcgcaattctaaaacgtatcgatacgcattttcaaaatacatgtcgtttgataaatacgatggtataataactaaatgtcataaagaaacaatattgctcaaactatccactgttctagacactacactatatgcagttttaagatgccataattcgaaaaagttaagaagatacctcaacgagttaaaaaaatataataacgataagtcctttaaaatatattctaatattatgaatgagagataccttaatgtatattataaagatatgtacgtgtcaaaggtatatgataaactatttcctgttttcacagataaaaattgtctactaacattactaccttcagaaattatatacgaaatattatacatgctgacaattaacgatctttataatatatcgtatccacctaccaaagtatagttgtatttttctcatgcgatgtgtgtaaaaaaactgatattatataaatattttagtgccgtataatgaagatgacgatgaaaatgatggtacatatatatttcgtatcattattgttattgctattccacagttacgccatagacatcgaaaatgaaatcacagaattcttcaataaaatgagagatactctaccagctaaagactctaaatggttgaatccagcatgtatgttcggaggcacaatgaatgatatagccgctctaggagagccattcagcgcaaagtgtcctcctattgaagacagtcttttatcgcacagatataaagactatgtggttaaatgggagaggctagaaaaaaatagacggcgacaggtttctaataaacgtgttaaacatggtgatttatggatagccaactatacatctaaattcagtaaccgtaggtatttgtgtaccgtaactacaaagaatggtgactgtgttcagggtatagttagatctcatattaaaaaacctccttcatgcattccaaaaacatatgaactaggtactcatgataagtatggcatagacttatactgtggaattctttacgcaaaacattataataatataacttggtataaagataataaggaaattaatatcgacgatattaagtattcacaaacgggaaagaaattaattattcataatccagagttagaagatagtggaagatacaactgttacgttcattacgacgacgttagaatcaagatgtaaaatacttacggttataccgtcgcaagaccacaggtttaaactaatactagatccaaaaatcaacgtaacgataggagaacctgccaatataacatgcactgctgtgtcaacgtcattattgattgacgatgtactgattgaatgggaaaatccatccggatggcttataggattcgattttgatgtatactctgttttaactagtagaggcggtatcaccgaggcgaccttgtactttgaaaatgttactgaagaatatataggtaatacatataaatgtcgtggacacaactattattttgaaaaaacccttacaactacagtagtattggagtaaatacacaatgcatttttatatacattactgaataattattattattatttatatcgtatttgtgctataacgcgactatctaggtatttgtatctcaccgatagagaacatataaatgtagactctattaaacagttgtgtaaaatatcagatcctaatagatgtggatgtacggctttagaaatgagttcattaaaatatgtgatatcaacggaacatatttatataattatactattgctgttagtataattattgattccacggaagaactaccaacagttactccaattacaacaacatataattatactatcgatgatagcactactgaagaactacaagtgactcctcatatggatctccatcgatgatacatgtattaaaatactttccgaataagtcttttaaatattgtattaattatgaaaaactatgctatgcgagtatgatacgatactagattttatctctagcgagagatgtcgttagaatcatttatcaacgaatatcgataacatgtgtcatttatacgttaaagtctgtccgtcttctctattgtttagactgtttgtagaatgctgtgatataaacaaactagtagacacaaatatttaactcatgatgaagttgagaatgatatgctttagctaatataaaaatatattaatccactatatattctagacttgatttaaaaccgataaactactactacgtactgtataagttaggagcagaccctaattatgtagatgatagaggtaatacttctgcatctatatgtccacttatgagaaaacgtcatttaataagatgcatcgtgaaaagaaatttattaaagagttggtaaaatatgaaaccgaaagtaaataatataggaaatacacctctacataactacgtatctcaatatgatatcactctcattcctcatccacaacccattaaaaaatggaaattaaagccctctattagcataaacggctacaggtctacctttacaatggcctttccttgtgcccagttcagaccctgtcattgccacgctactaaggactccctgaataccgtggccgacgtcagacattgtctgactgaatacatcctgtgggtttctcatagatggacccatagagaaagcgcagggtctctctacaggcttctcatctctttcagaactgatgcaacggagctctttggtggtgagttgaaggattcacttccgtggagatcattaaatgactccatgaaaaccgccgaagaacttcgtgcaatcattggactttgtactcaatcagctatcgtctctggaagagtcttcaacgataagtatatcgacatactacttatgctgcgaaagattctgaacgagaacgactatctcaccctcttggatcatatccgcactgctaaatactaaatctccttcatgctctctcactacactttttatcatcttatgaggaataattagcaccagaatagctatggattgcacatgtattctatgtcgtctactggatgaagatgtgacgtacaaaaaaataaaactagaaattgaaacgtgtcacaacttatcaaaacatatagatagacgaggaaacaatgcgctacattgttacgtctccaataaatgcgatacagacattaagattgttcgactgttactctctcgcggagtcgagagactttgtagaaacaacgaaggattaactccgctaggagcatacagtaagcatagatacgtaaaatctcagattgtgcatctactgatatccagctattcgaattcctctaacgaactcaagtcgaatataaatgatttcgacttacgtctgctaaaatacctaattgtggataaacggatacgtccgtccaagaatacgaattatgcaatcaatggtctcggattggtggatatatacgtaacgacgcctaatccgagaccagaagtattgctatggcttcttaaatcagaatgttacagcaccggttacgtatttcgtacctgtatgtacaacagtgatatgtgtaagaactctcttcattactatatatcgtctcatagagaatctctatccaaggatgtaattaaatgtttgatcgataacaatgtttccatccaatactactggtcttgctcaaccatagatatagagattattaataaaggatgtggacacgtgtagagtatacgacgtcagccctatattagaggcgtattatctaaacaagcgatttagagtaaccccatataatgtagacatggaaatcgttaatcttcttattgagagacgtcatactcttgtcgacgtaatgcgtagtattacttcgtacgattccagagaatataaccactacatcatcgataacattctaaagagatttagacaacaggatgaatccatcgtacaagccatactgataaactacttacattacggcgatatggtaagtatacctatcattcaatgcatgttggataagacgacggacaacaactttgttaataataatctcgtcgatgtaaacgtcgtaaggtttatcgtggaaaatatggacacgcggctgtaaatcacatatctaacaatggccgtctatgtatgtacggtctgatattatcgagatttaataattgcgggtatcactgttatgaagatgtatttgatatactaagcaagtacatggatgatatagatatgatcgataactctactatattacgcggtcgatgtcaataatatacaatttgcaaagcggttattggaatatggagcgagtgtcacgctcgataatcaatacggccatccagaaaagcagttaccaaagagaagctagttgatttattactgagttaccatcccactctagagactatgattgacgcatttaatagagatatacgctatctatatcctgaaccattattcgcctgtatcagatacgccttaatcctagatgatgattttccttctaaagtaagtatgatatcgccggtcgtcataaggaactaaagcgctatagagcagacattaatagaatgaagaatgcctacatatcaggcgtctccatgtttgatatattatttaaacgaagcaaacgccacagattgagatacgcaaagaacaatgagaggatcgactccattaaataatttatcatggagtgataatgtcctgtttccatggcatattacaaaatcgattccgtccaagatgataaaaacatttaccggcatcataaacacggagtttattttatatgtctcgcataaacattactaaaaaaatatattgttcggttttctttcacatctttaattatgaaaaagtaaatcattatgagatggacgcatcgttcgcgacagtatgtggtacatacctaacgtatttatggacgacggtaagaatgaaggtcacgtttctgtcaacaatgtcgacgcgatcgtgtaacacgactcacaatagaatctgtgaatgctctcccgatcatggatgcaaggcatgtgtttcccaaacaaaatgtggaataggatacggagtatccggagacgtcatctgttctccgtgtggtctcggaacatattctcacaccgtctcttccgcagataaatgcgaacccgtacccagaaatacctttaactatatcgatgtggaaattaacctgtatccagttaacgacacatcgtgtactcggacgaccactaccggtctcagcgaatccatctcaacgtcggaactaactattactatgaatcataaagactgcgatcccgtcttcttaataaggtagcgacttcaggtttctttacaggagaaaggtgtgcactctgaatttcgagattaaatgcaataacaaagattcttcctccaaacagttaacgaaagcaaagaatgatactatcatgccgcattcggagacagtaactctagcgtcgacatctatatactatatagtaataccaatactcaagactacgaaactgatacaatctcttatcatgtgggtaatgtagccatatgcccggtagttgcgatatacataaactgatcactaattccaaacccacccgctttttatagtaagtttttcacccataaatacaataattaatttctcgtaaaagtagaaaatatattctaatttattgcacggtaaggaagtagaatcataaagaacagtactcaatcaatagcaatcatgaaacaatatatcgtactggcatgcatgtgcctgccagtcttcagcaatcatcctcatcgtgtacggaagaagaaaacaaacatcatatgggaatcgatgttattatcaaagtcacaaagcaagaccaaacaccgaccgatgataagatttgccaatccgtaacggaaattacagagtccgagtcagatccagatcccgaggtggaatcagtcgaggatgtagatcctcctaccacttattactccatcatcggtggaggtctgagaatgaactttggattcaccaaatgtcctcagattaaatccatctcagaatccgctgatggaaagactgtgaggtgtctatcgacatcagatgtagcgaagaagagaaagacagcgacatcaagacccatccagtactcgggtctaacatctctcataagaaagtgagttacgaagatatcatcggttcaacgatcgtcgatacaaaatgtgtcaagaatctagagtttagcgttcgtatcggagacatgtgcaaggaatcatctgaacttgaggtcaagtatgtcgacggatcggcatctgaaggtgcaaccgatgatacttcactcatcgattcaacaaaactcaaagcgtgtgtctgaatcgataactctattcatctgaaattggatgagtagggttaatcgaacgattcaggcacaccacgaattaaaaaagtgtaccggacactatattccggtttgcaaaacaaaaagttacctctcgcgacttcttctttttctgtctcaatagtgtgatacgattatgacactattcctatttcctttcagggtatcacaaaaatattaaacctctttctgatggtctcatacaaaaatatttttattctctttctctctttgatggtctcataaaaaatatttttattctctttctctctttgatggtctcataaaatatttttattctctttctctctttgatggtctcataaaaaatatttttattctctttctctctttgatggtctcataaaatatttttattctctttctctctttgatggtctcataaaaaatatttttattctctttctctctttgatggtctcataaaaaatattaaacctctttctgatggtgtcactaaaatatttttattctctttctctcttcaatggagtcataaaatatttttattctctttctctcttcgatggtctcacaaaaatattaaacctctttctgatggtgtcactaaaatatttttattctctttctctcttcaatggagtcataaaatatttttattctctttctctctttgatggtctcacaaaaatatttttattctctttctctctttgatggtctcacaaaaatatttttattctctttctctctttgatggtctcacaaaaatatttttattctctttctctctttgatggtctcataaaaaaagttttacaaaaatatttttattctctttctctctttgatggtctcataaaaaaagttttacaaaaatatttttattctctttctctctttgatggtctcataaaaaaagttttacaaaaatatttttattctctttctctctttgatggtctcataaaaaatattaaacctctttctgatggtgtcactaaaatatttttattctcattctctcttcaatggagtcataaaatatttttattctctttctctcttcgatggtctcacaaaaatattaaacctctttctgatggtgtcactaaaatatttttattctcattctctcttcaatggagtcataaaatatttttattctctttctctcttcgatggtctcacaaaaatattaaacctctttctgatggtgtcactaaaatatttttattctcattctctcttcaatggagtcataaaatatttttattctctttctctctttgatggtctcataaaaaaagttttacaaaaatatttttattctctttctctctttgatggtctcataaaaaatattaaacctctttctgatggtgtcactaaaatatttttattctctttctctcttcaatggagtcataaaatatttttattctctttctctcttcgatggtctcacaaaaatattaaacctctttctgatggtgtcactaaaatatttttattctcattctctcttcaatggagtcataaaatatttttattctctttctctctttgatggtctcataaaaaaagttttacaaaaatatttttattctctttctctctttgatggtctcataaaaaaagttttacaaaaatatttttattctctttctctctttgatggtctcataaaaaaagttttacaaaaatatttttattctctttctctctttgatggtctcataaaaaaagttttacaaaaatatttttattctctttctctctttgatggtctcataaaaaatattaaacctctttctgatggtgtcactaaaatatttttattctcattctctcttcaatggagtcataaaatatttttattctctttctctcttcgatggtctcacaaaaatattaaacctctttctgatggtgtcactaaaatatttttattctcattctctcttcaatggagtcataaaatatttttattctctttctctctttgatggtctcataaaaaaagttttacaaaaatatttttattctctttctctctttgatggtctcataaaaaaagttttacaaaaatatttttattctctttctctctttgatggtctcataaaaaaagttttacaaaaatatttttattctctttctctctttgatggtctcataaaaaaagttttacaaaaatatttttattctctttctctctttgatggtctcacaaaaatattaaacctctttctgatggagtcgtaaaaaagttttatctctttctccttcgatggtctcacaaaaatattaaacctctttctgatggagtcgtaaaaaagttttatctctttctctcttcgatggtctcacaaaaatattaaacctctttctgatggagtcgtaaaaaagttttatctctttctctcttcgatggtctcactaaaatattttttattctctttctgatgcatcaactatttcttaaacaataacgtccaacaacatatactcgtcgagcttatcaacatcccctatgcccatctaggttaccagacaattgtatatcataaaataatgtttataatttttacaaaaatatttttattctctttctctctttgatggtctcataaaaaaagttttacaaaaatatttttattctctttctctctttgatggtctcataaaaaatattaaacctctttctgatggtgtcactaaaatatttttattctcattctctcttcaatggagtcataaaatatttttattctctttctctcttcgatggtctcacaaaaatattaaacctctttctgatggtgtcactaaaatatttttattctcattctctcttcaatggagtcataaaatatttttattctctttctctctttgatggtctcataaaaaaagttttacaaaaatatttttattctctttctctctttgatggtctcataaaaaaagttttacaaaaatatttttattctctttctctctttgatggtctcataaaaaaagttttacaaaaatatttttattctctttctctctttgatggtctcataaaaaaagttttacaaaaatatttttattctctttctctctttgatggtctcataaaaaaagttttacaaaaatatttttattctctttctctctttgatggtctcataaaaaaagttttacaaaaatatttttattctctttctctctttgatggtctcataaaaaaagttttacaaaaatatttttattctctttctctctttgatggtctcataaaaaatattaaacctctttctgatggtgtcactaaaatatttttattctctttctctcttcaatggagtcataaaatatttttattctctttctctcttcgatggtctcacaaaaatattaaacctctttctgatggtgtcactaaaatatttttattctcattctctcttcaatggagtcataaaatatttttattctctttctctctttgatggtctcataaaaaaagttttacaaaaatatttttattctctttctctctttgatggtctcataaaaaaagttttacaaaaatatttttattctctttctctctttgatggtctcataaaaaaagttttacaaaaatatttttattctctttctctctttgatggtctcataaaaaaagttttacaaaaatatttttattctctttctctctttgatggtctcataaaaaaagttttacaaaaatatttttattctctttctctctttgatggtctcataaaaaatattaaacctctttctgatggtgtcactaaaatatttttattctctttctctcttcaatggagtcataaaatatttttattctctttctctcttcgatggtctcacaaaaatattaaacctctttctgatggtgtcactaaaatatttttattctctttctctcttcaatggagtcataaaatatttttattctctttctctctttgatggtctcataaaaaaagttttacaaaaatatttttattctctttctctctttgatggtctcataaaaaaagttttacaaaaatatttttattctctttctctctttgatggtctcataaaaaaagttttacaaaaatatttttattctctttctctctttgatggtctcataaaaaaagttttacaaaaatatttttattctctttctctctttgatggtctcataaaaaaagttttacaaaaatatttttattctctttctctctttgatggtctcataaaaaaagttttacaaaaatatttttattctctttctctctttgatggtctcataaaaaaagttttacaaaaatatttttattctctttctctctttgatggtctcataaaaaatattaaacctctttctgatggtgtcactaaaatatttttattctcattttctctttctctcttcaatggagtcataaaatatttttattctctttctctctttgatggtctcataaaaaatattaaacctctttctgatggtgtcactaaaatatttttattctcattctctcttcaatggagtcataaaaaagttttatctctttctctcttcgatggtctcacaaaaatattaaacctctttctgatggagtcgtaaaaaagttttatctctttctctcttcgatggtctcacaaaaatattaaacctctttctgatgcatcaactatttcttaaacaataacgtccaacaacatatactcatcccctatgcccatctaggttaccagacaattgtatatcataaaataatgtttataatttacacgttaaaatcatataataaaacgtagatcgtataatattttttggtatataaatgatctagtaaaatccatgtaggggatactgctcacattttttctttggtacaaaatttcacacaagtttttatacagacaaattcttgtccatatattttaaaacattgacttttgtactaagaaaaatatctagactaactatctctttctctttctctcttcgatggtctttctgatggagtcgtaaaaaagttttatctctttctctcttcgatggtctcacaaaaatattaaacctctttctgatggagtcgtaaaaaagttttatctctttctctcttcgatggtctcacaaaaatattaaacctctttctgatggagtcgtaaaaaagttttatctctttctccttcgatggtctcacaaaaatattaaacctctttctgatggagtcgtaaaaaagttttatctctttctctcttcgatggtctcacaaaaatattaaacctctttctgatggtgtcactaaaatatttttattctctttctctcttcgatggtctcacaaaaatattaaacctctttctgatggagtcgtaaaaaagttttatctctttctccttcgatggtctcacaaaaatattaaacctctttctgatggagtcgtaaaaaagttttatctctttctctcttcgatggtctcacaaaaatattaaacctctttctgatggagtcgtaaaaaagttttatctctttctccttcgatggtctcacaaaaatattaaacctctttctgatggagtcgtaaaaaagttttatctctttctccttcgatggtctcacaaaaatattaaacctctttctgatggagtcgtaaaaaagttttatctctttctccttcgatggtctcacaaaaatattaaacctctttctgatggagtcgtaaaaaagttttatctctttctctcttcgatggtctcacaaaaatattaaacctctttctgatggagtcgtaaaaaagttttatctctttctctcttcgatggtctcacaaaaatattaaacctctttctgatggagtcgtaaaaaagttttatctctttctccttcgatggtctcacaaaaatattaaacctctttctgatagtctctataaagcgattgatttttcttaccctctagagtttcctacggtcgttggtcacacatttttttctagacactaaataaatagtaagattaaattaattataaaattatgtatataatattaattataaaattatgtatatgatttactaactttagttagataaattaataatacataaattttagtatattaatattataaattaataatacataaattttagtatattaatattatattttaaatatttatttagtgtctagaaaaaaaggccggcctagcaggcc

SEQ ID NO: 5 - DNA, 3822 bp, synthetic construct
  source 1..3822: mol_type = other DNA
atgtttgtctttcttgtcttattgccactagtctctagtcagtgtgttaatcttacaaccagaactcaattaccacctgcatacactaattctttcacacgtggtgtttattaccctgacaaagtattcagatcctcagtattacattcaactcaggacttgttcttacctttcttctccaatgttacttggttccatgctatacatgtctctgggaccaatggtactaagaggtttgataaccctgtcctaccatttaatgatggtgtttatttcgcttccactgagaagtctaacataataagaggctggatatttggtactactttagattcgaagacccagtccctacttattgttaataacgctactaatgttgttattaaagtctgtgaatttcaattctgtaatgatccattcttgggtgtttattaccacaagaacaacaagagttggatggaaagtgagttcagagtttattctagtgcgaataattgcactttcgaatatgtctctcagcctttccttatggaccttgaaggtaaacagggtaatttcaagaatcttagggaatttgtgtttaagaatattgatggttatttcaagatatattctaagcacacgcctattaatttagtgcgtgatctccctcagggtttctcggctttagaaccattggtagatttgccaataggtattaacatcactaggtttcaaactttacttgctttacatagaagttatttgactcctggtgattcttcttcaggttggacagctggtgctgcagcttattatgtgggttatcttcaacctaggactttcctattgaaatataatgagaatggaaccattacagatgctgtagactgtgcacttgaccctctctcagaaacaaagtgtacgttgaaatccttcactgtagagaaaggaatctatcaaacttctaactttagagtccaaccaacagaatctattgttagatttcctaatattacaaacttgtgccctttcggtgaagtatttaacgccaccagatttgcatctgtttatgcttggaacaggaagagaatcagcaactgtgttgctgattattctgtcctatataattccgcatcattctccacatttaagtgttatggagtgtctcctactaaattaaatgatctctgctttactaatgtctatgcagattcatttgtaattagaggtgatgaagtcagacaaatcgctccagggcaaactggaaagattgctgattataattataaattaccagatgactttacaggctgcgttatagcttggaattctaacaatcttgattctaaggttggtggtaattataattacctgtatagattgtttaggaagtctaatctcaaacctttcgagagagatatttcaactgaaatctatcaggccggtagcacaccttgtaatggtgttgaaggatttaattgttactttcctttacaatcatatggtttccaacccactaatggtgttggttaccaaccatacagagtagtagtactttcatttgaacttctacatgcaccagcaactgtttgtggacctaagaagtctactaatttggttaagaacaaatgtgtcaatttcaacttcaatggtttaacaggcacaggtgttcttactgagtctaacaagaagtttctgcctttccaacaatttggcagagacattgctgacactactgatgctgtccgtgatccacagacacttgagattcttgacattacaccatgttcatttggtggtgtcagtgttataacaccaggaacaaatacttctaaccaggttgctgttctttatcaggatgttaactgcacagaagtccctgttgctattcatgcagatcaacttactcctacttggcgtgtttattctacaggttctaatgtatttcaaacacgtgcaggctgtttaataggagctgaacatgtcaacaactcatatgagtgtgacatacccattggtgcaggtatatgcgctagttatcagactcagactaattctcctcggcgggcacgtagtgtagctagtcaatccatcattgcctacactatgtcacttggtgcagagaattcagttgcttactctaataactctattgccatacccacaaactttactattagtgttaccacagaaattctaccagtgtctatgaccaagacatcagtagattgtacaatgtacatttgtggtgattcaactgaatgcagcaatctattgttgcaatatggcagtttctgtacacaattaaaccgtgctttaactggaatagctgttgaacaagacaagaacacccaagaagtatttgcacaagtcaaacaaatttacaagacaccaccaattaaagatttcggtggatttaatttctcacaaatattaccagatccatctaaaccaagcaagaggtcatttattgaagatctactattcaacaaagtgacacttgcagatgctggcttcatcaaacaatatggtgattgccttggtgatattgctgctagagacctcatttgtgcacagaagtttaacggccttactgtattgccacctttgctcacagatgaaatgattgctcaatacacttctgcactgttagcgggtacaatcacttctggttggacctttggtgcaggtgctgcattacaaataccatttgctatgcaaatggcttataggtttaatggtattggagttacacagaatgttctctatgagaaccagaaattgattgccaaccaatttaatagtgctattggcaagattcaagactcactttcttccacagcaagtgcacttggtaaacttcaagatgtggtcaaccagaatgcacaagctttaaacacgcttgttaaacaacttagctccaactttggtgcaatttcaagtgtattaaatgatatcctttcacgtcttgacaaagttgaggctgaagtgcaaattgataggttgatcacaggcagacttcaaagtttgcagacatatgtgactcaacaattaattagagctgcagaaatcagagcttctgctaatcttgctgctactaagatgtcagagtgtgtacttggacaatctaagagagttgatttctgtggaaagggctatcatcttatgtccttccctcagtcagcacctcatggtgtagtcttcttgcatgtgacttatgtccctgcacaagagaagaacttcacaactgctcctgccatttgtcatgatggtaaagcacactttcctcgtgaaggtgtctttgtttcaaatggcacacactggtttgtaacacaaaggaatttctatgaaccacaaatcattactacagacaacacatttgtgtctggtaactgtgatgttgtaataggaattgtcaacaacacagtttatgatcctttgcaacctgaattagactcattcaaggaggagttagataaatatttcaagaatcatacatcaccagatgttgatttaggtgacatctctggcattaatgcttcagttgtaaacattcagaaagaaattgaccgcctcaatgaggttgccaagaatttaaatgaatctctcatcgatctccaagaacttggaaagtatgagcagtatatcaaatggccatggtacatttggctaggtttcatagctggcttgattgccatagtaatggtgacaattatgctttgctgtatgaccagttgctgtagttgtctcaagggctgttgttcttgtggatcctgctgcaaatttgatgaagacgactctgagccagtgctcaaaggagtcaaattacattacacataa

SEQ ID NO: 6 - protein, 1273 aa, synthetic construct
MFVFLVLLPLVSSQCVNLTTRTQLPPAYTNSFTRGVYYPDKVFRSSVLHSTQDLFLPFFSNVTWFHAIHVSGTNGTKRFDNPVLPFNDGVYFASTEKSNIIRGWIFGTTLDSKTQSLLIVNNATNVVIKVCEFQFCNDPFLGVYYHKNNKSWMESEFRVYSSANNCTFEYVSQPFLMDLEGKQGNFKNLREFVFKNIDGYFKIYSKHTPINLVRDLPQGFSALEPLVDLPIGINITRFQTLLALHRSYLTPGDSSSGWTAGAAAYYVGYLQPRTFLLKYNENGTITDAVDCALDPLSETKCTLKSFTVEKGIYQTSNFRVQPTESIVRFPNITNLCPFGEVFNATRFASVYAWNRKRISNCVADYSVLYNSASFSTFKCYGVSPTKLNDLCFTNVYADSFVIRGDEVRQIAPGQTGKIADYNYKLPDDFTGCVIAWNSNNLDSKVGGNYNYLYRLFRKSNLKPFERDISTEIYQAGSTPCNGVEGFNCYFPLQSYGFQPTNGVGYQPYRVVVLSFELLHAPATVCGPKKSTNLVKNKCVNFNFNGLTGTGVLTESNKKFLPFQQFGRDIADTTDAVRDPQTLEILDITPCSFGGVSVITPGTNTSNQVAVLYQDVNCTEVPVAIHADQLTPTWRVYSTGSNVFQTRAGCLIGAEHVNNSYECDIPIGAGICASYQTQTNSPRRARSVASQSIIAYTMSLGAENSVAYSNNSIAIPTNFTISVTTEILPVSMTKTSVDCTMYICGDSTECSNLLLQYGSFCTQLNRALTGIAVEQDKNTQEVFAQVKQIYKTPPIKDFGGFNFSQILPDPSKPSKRSFIEDLLFNKVTLADAGFIKQYGDCLGDIAARDLICAQKFNGLTVLPPLLTDEMIAQYTSALLAGTITSGWTFGAGAALQIPFAMQMAYRFNGIGVTQNVLYENQKLIANQFNSAIGKIQDSLSSTASALGKLQDVVNQNAQALNTLVKQLSSNFGAISSVLNDILSRLDKVEAEVQIDRLITGRLQSLQTYVTQQLIRAAEIRASANLAATKMSECVLGQSKRVDFCGKGYHLMSFPQSAPHGVVFLHVTYVPAQEKNFTTAPAICHDGKAHFPREGVFVSNGTHWFVTQRNFYEPQIITTDNTFVSGNCDVVIGIVNNTVYDPLQPELDSFKEELDKYFKNHTSPDVDLGDISGINASVVNIQKEIDRLNEVAKNLNESLIDLQELGKYEQYIKWPWYIWLGFIAGLIAIVMVTIMLCCMTSCCSCLKGCCSCGSCCKFDEDDSEPVLKGVKLHYT

SEQ ID NO: 7 - DNA, 1260 bp, synthetic construct
  source 1..1260: mol_type = other DNA
atgtctgataacggaccacagaatcagcgaaacgcaccacgcattacgtttggtggaccctcagattcaactggcagtaaccagaatggagaacgcagtggagcgcgatctaaacaacgtcggcctcaaggtttacccaataatactgcgtcttggttcaccgctctcactcaacatggcaaggaagaccttaaattccctcgaggacaaggcgttccaattaacaccaatagcagtccagatgaccaaattggctactaccgaagagctaccagacgaattcgtggtggtgacggtaagatgaaagatctcagtccaagatggtatttctactacctaggaactgggccagaagctggacttccctatggtgctaacaaagacggcatcatatgggttgcaactgagggagccttgaatacacctaaagatcacattggcacccgcaatcctgctaacaatgctgcaatcgtgctacaacttcctcaaggaacaacattgcctaaaggcttctacgcagaagggagcagaggcggcagtcaagcctcttctcgttcctcatcacgtagtcgcaacagttcaagaaattcaactccaggcagcagtagaggaacttctcctgctagaatggctggcaatggcggtgatgctgctcttgctttgctgctgcttgacagattgaaccagcttgagagcaagatgtctggtaaaggccaacaacaacaaggccaaactgtcactaagaaatctgctgctgaggcttctaagaagcctcggcagaaacgtactgccactaaagcatacaatgtaacacaagctttcggcagacgtggtccagaacaaacccaaggaaactttggagaccaggaactaatcagacaaggaactgattacaaacattggccgcaaattgcacaatttgctcccagcgcttcagcgttcttcggaatgtcgcgcattggcatggaagtcacaccttcgggaacgtggttgacctacacaggtgccatcaaattggatgacaaagatccaaatttcaaagatcaagtcatattgctgaataagcatattgacgcatacaagacattcccaccaacagagcctaagaaggacaagaagaagaaggctgatgaaactcaagccttaccgcagagacagaagaaacagcaaactgtgactcttcttcctgctgcagatttggatgatttctccaaacaattgcaacaatccatgagcagtgctgactcaactcaggcctaa

SEQ ID NO: 8 - protein, 419 aa, synthetic construct
MSDNGPQNQRNAPRITFGGPSDSTGSNQNGERSGARSKQRRPQGLPNNTASWFTALTQHGKEDLKFPRGQGVPINTNSSPDDQIGYYRRATRRIRGGDGKMKDLSPRWYFYYLGTGPEAGLPYGANKDGIIWVATEGALNTPKDHIGTRNPANNAAIVLQLPQGTTLPKGFYAEGSRGGSQASSRSSSRSRNSSRNSTPGSSRGTSPARMAGNGGDAALALLLLDRLNQLESKMSGKGQQQQGQTVTKKSAAEASKKPRQKRTATKAYNVTQAFGRRGPEQTQGNFGDQELIRQGTDYKHWPQIAQFAPSASAFFGMSRIGMEVTPSGTWLTYTGAIKLDDKDPNFKDQVILLNKHIDAYKTFPPTEPKKDKKKKADETQALPQRQKKQQTVTLLPAADLDDFSKQLQQSMSSADSTQA

SEQ ID NO: 9 - DNA, 3816 bp, synthetic construct
  source 1..3816: mol_type = other DNA
atgtttgtctttcttgtcttattgccactagtctctagtcagtgtgttaatcttagaaccagaactcaattaccacctgcatacactaattctttcacacgtggtgtttattaccctgacaaagtattcagatcctcagtattacattcaactcaggacttgttcttacctttcttctccaatgttacttggttccatgctatacatgtctctgggaccaatggtactaagaggtttgataaccctgtcctaccatttaatgatggtgtttatttcgcttccactgagaagtctaacataataagaggctggatatttggtactactttagattcgaagacccagtccctacttattgttaataacgctactaatgttgttattaaagtctgtgaatttcaattctgtaatgatccattcttggatgtttattaccacaagaacaacaagagttggatggaaagtggagtttattctagtgcgaataattgcactttcgaatatgtctctcagcctttccttatggaccttgaaggtaaacagggtaatttcaagaatcttagggaatttgtgtttaagaatattgatggttatttcaagatatattctaagcacacgcctattaatttagtgcgtgatctccctcagggtttctcggctttagaaccattggtagatttgccaataggtattaacatcactaggtttcaaactttacttgctttacatagaagttatttgactcctggtgattcttcttcaggttggacagctggtgctgcagcttattatgtgggttatcttcaacctaggactttcctattgaaatataatgagaatggaaccattacagatgctgtagactgtgcacttgaccctctctcagaaacaaagtgtacgttgaaatccttcactgtagagaaaggaatctatcaaacttctaactttagagtccaaccaacagaatctattgttagatttcctaatattacaaacttgtgccctttcggtgaagtatttaacgccaccagatttgcatctgtttatgcttggaacaggaagagaatcagcaactgtgttgctgattattctgtcctatataattccgcatcattctccacatttaagtgttatggagtgtctcctactaaattaaatgatctctgctttactaatgtctatgcagattcatttgtaattagaggtgatgaagtcagacaaatcgctccagggcaaactggaaagattgctgattataattataaattaccagatgactttacaggctgcgttatagcttggaattctaacaatcttgattctaaggttggtggtaattataattaccggtatagattgtttaggaagtctaatctcaaacctttcgagagagatatttcaactgaaatctatcaggccggtagcaaaccttgtaatggtgttgaaggatttaattgttactttcctttacaatcatatggtttccaacccactaatggtgttggttaccaaccatacagagtagtagtactttcatttgaacttctacatgcaccagcaactgtttgtggacctaagaagtctactaatttggttaagaacaaatgtgtcaatttcaacttcaatggtttaacaggcacaggtgttcttactgagtctaacaagaagtttctgcctttccaacaatttggcagagacattgctgacactactgatgctgtccgtgatccacagacacttgagattcttgacattacaccatgttcatttggtggtgtcagtgttataacaccaggaacaaatacttctaaccaggttgctgttctttatcagggtgttaactgcacagaagtccctgttgctattcatgcagatcaacttactcctacttggcgtgtttattctacaggttctaatgtatttcaaacacgtgcaggctgtttaataggagctgaacatgtcaacaactcatatgagtgtgacatacccattggtgcaggtatatgcgctagttatcagactcagactaattctcgtcggcgggcacgtagtgtagctagtcaatccatcattgcctacactatgtcacttggtgcagagaattcagttgcttactctaataactctattgccatacccacaaactttactattagtgttaccacagaaattctaccagtgtctatgaccaagacatcagtagattgtacaatgtacatttgtggtgattcaactgaatgcagcaatctattgttgcaatatggcagtttctgtacacaattaaaccgtgctttaactggaatagctgttgaacaagacaagaacacccaagaagtatttgcacaagtcaaacaaatttacaagacaccaccaattaaagatttcggtggatttaatttctcacaaatattaccagatccatctaaaccaagcaagaggtcatttattgaagatctactattcaacaaagtgacacttgcagatgctggcttcatcaaacaatatggtgattgccttggtgatattgctgctagagacctcatttgtgcacagaagtttaacggccttactgtattgccacctttgctcacagatgaaatgattgctcaatacacttctgcactgttagcgggtacaatcacttctggttggacctttggtgcaggtgctgcattacaaataccatttgctatgcaaatggcttataggtttaatggtattggagttacacagaatgttctctatgagaaccagaaattgattgccaaccaatttaatagtgctattggcaagattcaagactcactttcttccacagcaagtgcacttggtaaacttcagaatgtggtcaaccagaatgcacaagctttaaacacgcttgttaaacaacttagctccaactttggtgcaatttcaagtgtattaaatgatatcctttcacgtcttgacaaagttgaggctgaagtgcaaattgataggttgatcacaggcagacttcaaagtttgcagacatatgtgactcaacaattaattagagctgcagaaatcagagcttctgctaatcttgctgctactaagatgtcagagtgtgtacttggacaatctaagagagttgatttctgtggaaagggctatcatcttatgtccttccctcagtcagcacctcatggtgtagtcttcttgcatgtgacttatgtccctgcacaagagaagaacttcacaactgctcctgccatttgtcatgatggtaaagcacactttcctcgtgaaggtgtctttgtttcaaatggcacacactggtttgtaacacaaaggaatttctatgaaccacaaatcattactacagacaacacatttgtgtctggtaactgtgatgttgtaataggaattgtcaacaacacagtttatgatcctttgcaacctgaattagactcattcaaggaggagttagataaatatttcaagaatcatacatcaccagatgttgatttaggtgacatctctggcattaatgcttcagttgtaaacattcagaaagaaattgaccgcctcaatgaggttgccaagaatttaaatgaatctctcatcgatctccaagaacttggaaagtatgagcagtatatcaaatggccatggtacatttggctaggtttcatagctggcttgattgccatagtaatggtgacaattatgctttgctgtatgaccagttgctgtagttgtctcaagggctgttgttcttgtggatcctgctgcaaatttgatgaagacgactctgagccagtgctcaaaggagtcaaattacattacacataa

SEQ ID NO: 10 - protein, 1271 aa, synthetic construct
MFVFLVLLPLVSSQCVNLRTRTQLPPAYTNSFTRGVYYPDKVFRSSVLHSTQDLFLPFFSNVTWFHAIHVSGTNGTKRFDNPVLPFNDGVYFASTEKSNIIRGWIFGTTLDSKTQSLLIVNNATNVVIKVCEFQFCNDPFLDVYYHKNNKSWMESGVYSSANNCTFEYVSQPFLMDLEGKQGNFKNLREFVFKNIDGYFKIYSKHTPINLVRDLPQGFSALEPLVDLPIGINITRFQTLLALHRSYLTPGDSSSGWTAGAAAYYVGYLQPRTFLLKYNENGTITDAVDCALDPLSETKCTLKSFTVEKGIYQTSNFRVQPTESIVRFPNITNLCPFGEVFNATRFASVYAWNRKRISNCVADYSVLYNSASFSTFKCYGVSPTKLNDLCFTNVYADSFVIRGDEVRQIAPGQTGKIADYNYKLPDDFTGCVIAWNSNNLDSKVGGNYNYRYRLFRKSNLKPFERDISTEIYQAGSKPCNGVEGFNCYFPLQSYGFQPTNGVGYQPYRVVVLSFELLHAPATVCGPKKSTNLVKNKCVNFNFNGLTGTGVLTESNKKFLPFQQFGRDIADTTDAVRDPQTLEILDITPCSFGGVSVITPGTNTSNQVAVLYQGVNCTEVPVAIHADQLTPTWRVYSTGSNVFQTRAGCLIGAEHVNNSYECDIPIGAGICASYQTQTNSRRRARSVASQSIIAYTMSLGAENSVAYSNNSIAIPTNFTISVTTEILPVSMTKTSVDCTMYICGDSTECSNLLLQYGSFCTQLNRALTGIAVEQDKNTQEVFAQVKQIYKTPPIKDFGGFNFSQILPDPSKPSKRSFIEDLLFNKVTLADAGFIKQYGDCLGDIAARDLICAQKFNGLTVLPPLLTDEMIAQYTSALLAGTITSGWTFGAGAALQIPFAMQMAYRFNGIGVTQNVLYENQKLIANQFNSAIGKIQDSLSSTASALGKLQNVVNQNAQALNTLVKQLSSNFGAISSVLNDILSRLDKVEAEVQIDRLITGRLQSLQTYVTQQLIRAAEIRASANLAATKMSECVLGQSKRVDFCGKGYHLMSFPQSAPHGVVFLHVTYVPAQEKNFTTAPAICHDGKAHFPREGVFVSNGTHWFVTQRNFYEPQIITTDNTFVSGNCDVVIGIVNNTVYDPLQPELDSFKEELDKYFKNHTSPDVDLGDISGINASVVNIQKEIDRLNEVAKNLNESLIDLQELGKYEQYIKWPWYIWLGFIAGLIAIVMVTIMLCCMTSCCSCLKGCCSCGSCCKFDEDDSEPVLKGVKLHYT

SEQ ID NO: 11 - DNA, 3816 bp, synthetic construct
  source 1..3816: mol_type = other DNA
atgtttgtctttcttgtcttattgccactagtctctagtcagtgtgttaatcttagaaccagaactcaattaccacctgcatacactaattctttcacacgtggtgtttattaccctgacaaagtattcagatcctcagtattacattcaactcaggacttgttcttacctttcttctccaatgttacttggttccatgctatacatgtctctgggaccaatggtactaagaggtttgataaccctgtcctaccatttaatgatggtgtttatttcgcttccactgagaagtctaacataataagaggctggatatttggtactactttagattcgaagacccagtccctacttattgttaataacgctactaatgttgttattaaagtctgtgaatttcaattctgtaatgatccattcttgggtgtttattaccacaagaacaacaagagttggatggaaagtggtgtttattctagtgcgaataattgcactttcgaatatgtctctcagcctttccttatggaccttgaaggtaaacagggtaatttcaagaatcttagggaatttgtgtttaagaatattgatggttatttcaagatatattctaagcacacgcctattaatttagtgcgtgatctccctcagggtttctcggctttagaaccattggtagatttgccaataggtattaacatcactaggtttcaaactttacttgctttacatagaagttatttgactcctggtgattctttctcaggttggacagctggtgctgcagcttattatgtgggttatcttcaacctaggactttcctattgaaatataatgagaatggaaccattacagatgctgtagactgtgcacttgaccctctctcagaaacaaagtgtacgttgaaatccttcactgtagagaaaggaatctatcaaacttctaactttagagtccaaccaacagaatctattgttagatttcctaatattacaaacttgtgccctttcggtgaagtatttaacgccaccagatttgcatctgtttatgcttggaacaggaagagaatcagcaactgtgttgctgattattctgtcctatataattccgcatcattctccacatttaagtgttatggagtgtctcctactaaattaaatgatctctgctttactaatgtctatgcagattcatttgtaattagaggtgatgaagtcagacaaatcgctccagggcaaactggaaagattgctgattataattataaattaccagatgactttacaggctgcgttatagcttggaattctaacaatcttgattctaaggttggtggtaattataattaccggtatagattgtttaggaagtctaatctcaaacctttcgagagagatatttcaactgaaatctatcaggccggtagcaaaccttgtaatggtgttgaaggatttaattgttactttcctttacaatcatatggtttccaacccactaatggtgttggttaccaaccatacagagtagtagtactttcatttgaacttctacatgcaccagcaactgtttgtggacctaagaagtctactaatttggttaagaacaaatgtgtcaatttcaacttcaatggtttaacaggcacaggtgttcttactgagtctaacaagaagtttctgcctttccaacaatttggcagagacattgctgacactactgatgctgtccgtgatccacagacacttgagattcttgacattacaccatgttcatttggtggtgtcagtgttataacaccaggaacaaatacttctaaccaggttgctgttctttatcagggtgttaactgcacagaagtccctgttgctattcatgcagatcaacttactcctacttggcgtgtttattctacaggttctaatgtatttcaaacacgtgcaggctgtttaataggagctgaacatgtcaacaactcatatgagtgtgacatacccattggtgcaggtatatgcgctagttatcagactcagactaattctcgtcggcgggcacgtagtgtagctagtcaatccatcattgcctacactatgtcacttggtgcagagaattcagttgcttactctaataactctattgccatacccacaaactttactattagtgttaccacagaaattctaccagtgtctatgaccaagacatcagtagattgtacaatgtacatttgtggtgattcaactgaatgcagcaatctattgttgcaatatggcagtttctgtacacaattaaaccgtgctttaactggaatagctgttgaacaagacaagaacacccaagaagtatttgcacaagtcaaacaaatttacaagacaccaccaattaaagatttcggtggatttaatttctcacaaatattaccagatccatctaaaccaagcaagaggtcatttattgaagatctactattcaacaaagtgacacttgcagatgctggcttcatcaaacaatatggtgattgccttggtgatattgctgctagagacctcatttgtgcacagaagtttaacggccttactgtattgccacctttgctcacagatgaaatgattgctcaatacacttctgcactgttagcgggtacaatcacttctggttggacctttggtgcaggtgctgcattacaaataccatttgctatgcaaatggcttataggtttaatggtattggagttacacagaatgttctctatgagaaccagaaattgattgccaaccaatttaatagtgctattggcaagattcaagactcactttcttccacagcaagtgcacttggtaaacttcagaatgtggtcaaccagaatgcacaagctttaaacacgcttgttaaacaacttagctccaactttggtgcaatttcaagtgtattaaatgatatcctttcacgtcttgacaaagttgaggctgaagtgcaaattgataggttgatcacaggcagacttcaaagtttgcagacatatgtgactcaacaattaattagagctgcagaaatcagagcttctgctaatcttgctgctactaagatgtcagagtgtgtacttggacaatctaagagagttgatttctgtggaaagggctatcatcttatgtccttccctcagtcagcacctcatggtgtagtcttcttgcatgtgacttatgtccctgcacaagagaagaacttcacaactgctcctgccatttgtcatgatggtaaagcacactttcctcgtgaaggtgtctttgtttcaaatggcacacactggtttgtaacacaaaggaatttctatgaaccacaaatcattactacagacaacacatttgtgtctggtaactgtgatgttgtaataggaattgtcaacaacacagtttatgatcctttgcaacctgaattagactcattcaaggaggagttagataaatatttcaagaatcatacatcaccagatgttgatttaggtgacatctctggcattaatgcttcagttgtaaacattcagaaagaaattgaccgcctcaatgaggttgccaagaatttaaatgaatctctcatcgatctccaagaacttggaaagtatgagcagtatatcaaatggccatggtacatttggctaggtttcatagctggcttgattgccatagtaatggtgacaattatgctttgctgtatgaccagttgctgtagttgtctcaagggctgttgttcttgtggatcctgctgcaaatttgatgaagacgactctgagccagtgctcaaaggagtcaaattacattacacataa

SEQ ID NO: 12 - protein, 1271 aa, synthetic construct
MFVFLVLLPLVSSQCVNLRTRTQLPPAYTNSFTRGVYYPDKVFRSSVLHSTQDLFLPFFSNVTWFHAIHVSGTNGTKRFDNPVLPFNDGVYFASTEKSNIIRGWIFGTTLDSKTQSLLIVNNATNVVIKVCEFQFCNDPFLGVYYHKNNKSWMESGVYSSANNCTFEYVSQPFLMDLEGKQGNFKNLREFVFKNIDGYFKIYSKHTPINLVRDLPQGFSALEPLVDLPIGINITRFQTLLALHRSYLTPGDSFSGWTAGAAAYYVGYLQPRTFLLKYNENGTITDAVDCALDPLSETKCTLKSFTVEKGIYQTSNFRVQPTESIVRFPNITNLCPFGEVFNATRFASVYAWNRKRISNCVADYSVLYNSASFSTFKCYGVSPTKLNDLCFTNVYADSFVIRGDEVRQIAPGQTGKIADYNYKLPDDFTGCVIAWNSNNLDSKVGGNYNYRYRLFRKSNLKPFERDISTEIYQAGSKPCNGVEGFNCYFPLQSYGFQPTNGVGYQPYRVVVLSFELLHAPATVCGPKKSTNLVKNKCVNFNFNGLTGTGVLTESNKKFLPFQQFGRDIADTTDAVRDPQTLEILDITPCSFGGVSVITPGTNTSNQVAVLYQGVNCTEVPVAIHADQLTPTWRVYSTGSNVFQTRAGCLIGAEHVNNSYECDIPIGAGICASYQTQTNSRRRARSVASQSIIAYTMSLGAENSVAYSNNSIAIPTNFTISVTTEILPVSMTKTSVDCTMYICGDSTECSNLLLQYGSFCTQLNRALTGIAVEQDKNTQEVFAQVKQIYKTPPIKDFGGFNFSQILPDPSKPSKRSFIEDLLFNKVTLADAGFIKQYGDCLGDIAARDLICAQKFNGLTVLPPLLTDEMIAQYTSALLAGTITSGWTFGAGAALQIPFAMQMAYRFNGIGVTQNVLYENQKLIANQFNSAIGKIQDSLSSTASALGKLQNVVNQNAQALNTLVKQLSSNFGAISSVLNDILSRLDKVEAEVQIDRLITGRLQSLQTYVTQQLIRAAEIRASANLAATKMSECVLGQSKRVDFCGKGYHLMSFPQSAPHGVVFLHVTYVPAQEKNFTTAPAICHDGKAHFPREGVFVSNGTHWFVTQRNFYEPQIITTDNTFVSGNCDVVIGIVNNTVYDPLQPELDSFKEELDKYFKNHTSPDVDLGDISGINASVVNIQKEIDRLNEVAKNLNESLIDLQELGKYEQYIKWPWYIWLGFIAGLIAIVMVTIMLCCMTSCCSCLKGCCSCGSCCKFDEDDSEPVLKGVKLHYT

SEQ ID NO: 13 - DNA, 3822 bp, synthetic construct
  source 1..3822: mol_type = other DNA
atgtttgtctttcttgtcttattgccactagtctctagtcagtgtgttaatcttacaaccagaactcaattaccacctgcatacactaattctttcacacgtggtgtttattaccctgacaaagtattcagatcctcagtattacattcaactcaggacttgttcttacctttcttctccaatgttacttggttccatgctatacatgtctctgggaccaatggtactaagaggtttgataaccctgtcctaccatttaatgatggtgtttatttcgcttccattgagaagtctaacataataagaggctggatatttggtactactttagattcgaagacccagtccctacttattgttaataacgctactaatgttgttattaaagtctgtgaatttcaattctgtaatgatccattcttgggtgtttctaaccacaagaacaacaagagttggatggaaagtgagttcagagtttattctagtgcgaataattgcactttcgaatatgtctctcagcctttccttatggaccttgaaggtaaacagggtaatttcaagaatcttagggaatttgtgtttaagaatattgatggttatttcaagatatattctaagcacacgcctattaatttagtgcgtgatctccctcagggtttctcggctttagaaccattggtagatttgccaataggtattaacatcactaggtttcaaactttacttgctttacatagaagttatttgactcctggtgattcttcttcaggttggacagctggtgctgcagcttattatgtgggttatcttcaacctaggactttcctattgaaatataatgagaatggaaccattacagatgctgtagactgtgcacttgaccctctctcagaaacaaagtgtacgttgaaatccttcactgtagagaaaggaatctatcaaacttctaactttagagtccaaccaacagaatctattgttagatttcctaatattacaaacttgtgccctttcggtgaagtatttaacgccaccaaatttgcatctgtttatgcttggaacaggaagagaatcagcaactgtgttgctgattattctgtcctatataattccgcatcattctccacatttaagtgttatggagtgtctcctactaaattaaatgatctctgctttactaatgtctatgcagattcatttgtaattagaggtgatgaagtcagacaaatcgctccagggcaaactggaaagattgctgattataattataaattaccagatgactttacaggctgcgttatagcttggaattctaacaatcttgattctaaggttggtggtaattataattacctgtatagattgtttaggaagtctaatctcaaacctttcgagagagatatttcaactgaaatctatcaggccggtagcacaccttgtaatggtgttaaaggatttaattgttactttcctttacaatcatatggtttccaacccacttatggtgttggttaccaaccatacagagtagtagtactttcatttgaacttctacatgcaccagcaactgtttgtggacctaagaagtctactaatttggttaagaacaaatgtgtcaatttcaacttcaatggtttaacaggcacaggtgttcttactgagtctaacaagaagtttctgcctttccaacaatttggcagagacattgctgacactactgatgctgtccgtgatccacagacacttgagattcttgacattacaccatgttcatttggtggtgtcagtgttataacaccaggaacaaatacttctaaccaggttgctgttctttatcagggtgttaactgcacagaagtccctgttgctattcatgcagatcaacttactcctacttggcgtgtttattctacaggttctaatgtatttcaaacacgtgcaggctgtttaataggagctgaacatgtcaacaactcatatgagtgtgacatacccattggtgcaggtatatgcgctagttatcagactcagactaattctcatcggcgggcacgtagtgtagctagtcaatccatcattgcctacactatgtcacttggtgcagagaattcagttgcttactctaataactctattgccatacccacaaactttactattagtgttaccacagaaattctaccagtgtctatgaccaagacatcagtagattgtacaatgtacatttgtggtgattcaactgaatgcagcaatctattgttgcaatatggcagtttctgtacacaattaaaccgtgctttaactggaatagctgttgaacaagacaagaacacccaagaagtatttgcacaagtcaaacaaatttacaagacaccaccaattaaagatttcggtggatttaatttctcacaaatattaccagatccatctaaaccaagcaagaggtcatttattgaagatctactattcaacaaagtgacacttgcagatgctggcttcatcaaacaatatggtgattgccttggtgatattgctgctagagacctcatttgtgcacagaagtttaacggccttactgtattgccacctttgctcacagatgaaatgattgctcaatacacttctgcactgttagcgggtacaatcacttctggttggacctttggtgcaggtgctgcattacaaataccatttgctatgcaaatggcttataggtttaatggtattggagttacacagaatgttctctatgagaaccagaaattgattgccaaccaatttaatagtgctattggcaagattcaagactcactttcttccacagcaagtgcacttggtaaacttcagaatgtggtcaaccagaatgcacaagctttaaacacgcttgttaaacaacttagctccaactttggtgcaatttcaagtgtattaaatgatatcctttcacgtcttgacaaagttgaggctgaagtgcaaattgataggttgatcacaggcagacttcaaagtttgcagacatatgtgactcaacaattaattagagctgcagaaatcagagcttctgctaatcttgctgctactaagatgtcagagtgtgtacttggacaatctaagagagttgatttctgtggaaagggctatcatcttatgtccttccctcagtcagcacctcatggtgtagtcttcttgcatgtgacttatgtccctgcacaagagaagaacttcacaactgctcctgccatttgtcatgatggtaaagcacactttcctcgtgaaggtgtctttgtttcaaatggcacacactggtttgtaacacaaaggaatttctatgaaccacaaatcattactacagacaacacatttgtgtctggtaactgtgatgttgtaataggaattgtcaacaacacagtttatgatcctttgcaacctgaattagactcattcaaggaggagttagataaatatttcaagaatcatacatcaccagatgttgatttaggtgacatctctggcattaatgcttcagttgtaaacattcagaaagaaattgaccgcctcaatgaggttgccaagaatttaaatgaatctctcatcgatctccaagaacttggaaagtatgagcagtatatcaaatggccatggtacatttggctaggtttcatagctggcttgattgccatagtaatggtgacaattatgctttgctgtatgaccagttgctgtagttgtctcaagggctgttgttcttgtggatcctgctgcaaatttgatgaagacgactctgagccagtgctcaaaggagtcaaattacattacacataa

SEQ ID NO: 14 - protein, 1273 aa, synthetic construct
MFVFLVLLPLVSSQCVNLTTRTQLPPAYTNSFTRGVYYPDKVFRSSVLHSTQDLFLPFFSNVTWFHAIHVSGTNGTKRFDNPVLPFNDGVYFASIEKSNIIRGWIFGTTLDSKTQSLLIVNNATNVVIKVCEFQFCNDPFLGVSNHKNNKSWMESEFRVYSSANNCTFEYVSQPFLMDLEGKQGNFKNLREFVFKNIDGYFKIYSKHTPINLVRDLPQGFSALEPLVDLPIGINITRFQTLLALHRSYLTPGDSSSGWTAGAAAYYVGYLQPRTFLLKYNENGTITDAVDCALDPLSETKCTLKSFTVEKGIYQTSNFRVQPTESIVRFPNITNLCPFGEVFNATKFASVYAWNRKRISNCVADYSVLYNSASFSTFKCYGVSPTKLNDLCFTNVYADSFVIRGDEVRQIAPGQTGKIADYNYKLPDDFTGCVIAWNSNNLDSKVGGNYNYLYRLFRKSNLKPFERDISTEIYQAGSTPCNGVKGFNCYFPLQSYGFQPTYGVGYQPYRVVVLSFELLHAPATVCGPKKSTNLVKNKCVNFNFNGLTGTGVLTESNKKFLPFQQFGRDIADTTDAVRDPQTLEILDITPCSFGGVSVITPGTNTSNQVAVLYQGVNCTEVPVAIHADQLTPTWRVYSTGSNVFQTRAGCLIGAEHVNNSYECDIPIGAGICASYQTQTNSHRRARSVASQSIIAYTMSLGAENSVAYSNNSIAIPTNFTISVTTEILPVSMTKTSVDCTMYICGDSTECSNLLLQYGSFCTQLNRALTGIAVEQDKNTQEVFAQVKQIYKTPPIKDFGGFNFSQILPDPSKPSKRSFIEDLLFNKVTLADAGFIKQYGDCLGDIAARDLICAQKFNGLTVLPPLLTDEMIAQYTSALLAGTITSGWTFGAGAALQIPFAMQMAYRFNGIGVTQNVLYENQKLIANQFNSAIGKIQDSLSSTASALGKLQNVVNQNAQALNTLVKQLSSNFGAISSVLNDILSRLDKVEAEVQIDRLITGRLQSLQTYVTQQLIRAAEIRASANLAATKMSECVLGQSKRVDFCGKGYHLMSFPQSAPHGVVFLHVTYVPAQEKNFTTAPAICHDGKAHFPREGVFVSNGTHWFVTQRNFYEPQIITTDNTFVSGNCDVVIGIVNNTVYDPLQPELDSFKEELDKYFKNHTSPDVDLGDISGINASVVNIQKEIDRLNEVAKNLNESLIDLQELGKYEQYIKWPWYIWLGFIAGLIAIVMVTIMLCCMTSCCSCLKGCCSCGSCCKFDEDDSEPVLKGVKLHYT

SEQ ID NO: 15 - DNA, 3813 bp, synthetic construct
  source 1..3813: mol_type = other DNA
atgtttgtctttcttgtcttattgctactagtctctagtcagtgtgttaatcttacaaccagaactcaattaccacctgcatacactaattctttcacacgtggtgtttattaccctgacaaagtattcagatcctcagtattacattcaactcaggacttgttcttacctttcttctccaatgttacttggttccatgctatacatgtctctgggaccaatggtactaagaggtttgataaccctgtcctaccatttaatgatggtgtttatttcgcttccactgagaagtctaacataataagaggctggatatttggtactactttagattcgaagacccagtccctacttattgttaataacgctactaatgttgttattaaagtctgtgaatttcaattctttaatgatccattcttgggtgtttaccacaagaacaacaagagttggatggaaagtgagttcagagtttattctagtgcgaataattgcactttcgaatatgtctctcagcctttccttatggaccttgaaggtaaacagggtaatttcaagaatcttagcgaatttgtgtttaagaatattgatggttatttcaagatatattctaagcacacgcctattaatttagtgcgtggtctccctcagggtttctcggctttagaaccattggtagatttgccaataggtattaacatcactaggtttcaaactttattacatagaagttatttgactcctggtgattcttcttcaggttggacagctggtgctgcagcttattatgtgggttatcttcaacctaggactttcctattgaaatataatgagaatggaaccattacagatgctgtagactgtgcacttgaccctctctcagaaacaaagtgtacgttgaaatccttcactgtagagaaaggaatctatcaaacttctaactttagagtccaaccaacagaatctattgttagatttcctaatattacaaacttgtgccctttcggtgaagtatttaacgccaccagatttgcatctgtttatgcttggaacaggaagagaatcagcaactgtgttgctgattattctgtcctatataattccgcatcattctccacatttaagtgttatggagtgtctcctactaaattaaatgatctctgctttactaatgtctatgcagattcatttgtaattagaggtgatgaagtcagacaaatcgctccagggcaaactggaaagattgctgattataattataaattaccagatgactttacaggctgcgttatagcttggaattctaacaatcttgattctaaggttggtggtaatcataattacctgtatagattgtttaggaagtctaatctcaaacctttcgagagagatatttcaactgaaatctatcaggccggtagcacaccttgtaatggtgttaaaggatttaattgttactttcctttacaatcatatggtttccaacccacttatggtgttggttaccaaccatacagagtagtagtactttcatttgaacttctacatgcaccagcaactgtttgtggacctaagaagtctactaatttggttaagaacaaatgtgtcaatttcaacttcaatggtttaacaggcacaggtgttcttactgagtctaacaagaagtttctgcctttccaacaatttggcagagacattgctgacactactgatgctgtccgtgatccacagacacttgagattcttgacattacaccatgttcatttggtggtgtcagtgttataacaccaggaacaaatacttctaaccaggttgctgttctttatcagggtgttaactgcacagaagtccctgttgctattcatgcagatcaacttactcctacttggcgtgtttattctacaggttctaatgtatttcaaacacgtgcaggctgtttaataggagctgaatatgtcaacaactcatatgagtgtgacatacccattggtgcaggtatatgcgctagttatcagactcagactaagtctcctcggcgggcacgtagtgtagctagtcaatccatcattgcctacactatgtcacttggtgcagagaattcagttgcttactctaataactctattgccatacccataaactttactattagtgttaccacagaaattctaccagtgtctatgaccaagacatcagtagattgtacaatgtacatttgtggtgattcaactgaatgcagcaatctattgttgcaatatggcagtttctgtacacaattaaaccgtgctttaactggaatagctgttgaacaagacaagaacacccaagaagtatttgcacaagtcaaacaaatttacaagacaccaccaattaaagatttcggtggatttaatttctcacaaatattaccagatccatctaaaccaagcaagaggtcatttattgaagatctactattcaacaaagtgacacttgcagatgctggcttcatcaaacaatatggtgattgccttggtgatattgctgctagagacctcatttgtgcacagaagtttaacggccttaatgtattgccacctttgctcacagatgaaatgattgctcaatacacttctgcactgttagcgggtacaatcacttctggttggacctttggtgcaggtgctgcattacaaataccatttgctatgcaaatggcttataggtttaatggtattggagttacacagaatgttctctatgagaaccagaaattgattgccaaccaatttaatagtgctattggcaagattcaagactcactttcttccacagcaagtgcacttggtaaacttcaagatgtggtcaaccagaatgcacaagctttaaacacgcttgttaaacaacttagctccaactttggtgcaatttcaagtgtattaaatgatatcctttcacgtcttgacaaagttgaggctgaagtgcaaattgataggttgatcacaggcagacttcaaagtttgcagacatatgtgactcaacaattaattagagctgcagaaatcagagcttctgctaatcttgctgctactaagatgtcagagtgtgtacttggacaatctaagagagttgatttctgtggaaagggctatcatcttatgtccttccctcagtcagcacctcatggtgtagtcttcttgcatgtgacttatgtccctgcacaagagaagaacttcacaactgctcctgccatttgtcatgatggtaaagcacactttcctcgtgaaggtgtctttgtttcaaatggcacacactggtttgtaacacaaaggaatttctatgaaccacaaatcattactacagacaacacatttgtgtctggtaactgtgatgttgtaataggaattgtcaacaacacagtttatgatcctttgcaacctgaattagactcattcaaggaggagttagataaatatttcaagaatcatacatcaccagatgttgatttaggtgacatctctggcattaatgcttcagttgtaaacattcagaaagaaattgaccgcctcaatgaggttgccaagaatttaaatgaatctctcatcgatctccaagaacttggaaagtatgagcagtatatcaaatggccatggtacatttggctaggtttcatagctggcttgattgccatagtaatggtgacaattatgctttgctgtatgaccagttgctgtagttgtctcaagggctgttgttcttgtggatcctgctgcaaatttgatgaagacgactctgagccagtgctcaaaggagtcaaattacattacacataa

SEQ ID NO: 16 - protein, 1270 aa, synthetic construct
MFVFLVLLLLVSSQCVNLTTRTQLPPAYTNSFTRGVYYPDKVFRSSVLHSTQDLFLPFFSNVTWFHAIHVSGTNGTKRFDNPVLPFNDGVYFASTEKSNIIRGWIFGTTLDSKTQSLLIVNNATNVVIKVCEFQFFNDPFLGVYHKNNKSWMESEFRVYSSANNCTFEYVSQPFLMDLEGKQGNFKNLSEFVFKNIDGYFKIYSKHTPINLVRGLPQGFSALEPLVDLPIGINITRFQTLLHRSYLTPGDSSSGWTAGAAAYYVGYLQPRTFLLKYNENGTITDAVDCALDPLSETKCTLKSFTVEKGIYQTSNFRVQPTESIVRFPNITNLCPFGEVFNATRFASVYAWNRKRISNCVADYSVLYNSASFSTFKCYGVSPTKLNDLCFTNVYADSFVIRGDEVRQIAPGQTGKIADYNYKLPDDFTGCVIAWNSNNLDSKVGGNHNYLYRLFRKSNLKPFERDISTEIYQAGSTPCNGVKGFNCYFPLQSYGFQPTYGVGYQPYRVVVLSFELLHAPATVCGPKKSTNLVKNKCVNFNFNGLTGTGVLTESNKKFLPFQQFGRDIADTTDAVRDPQTLEILDITPCSFGGVSVITPGTNTSNQVAVLYQGVNCTEVPVAIHADQLTPTWRVYSTGSNVFQTRAGCLIGAEYVNNSYECDIPIGAGICASYQTQTKSPRRARSVASQSIIAYTMSLGAENSVAYSNNSIAIPINFTISVTTEILPVSMTKTSVDCTMYICGDSTECSNLLLQYGSFCTQLNRALTGIAVEQDKNTQEVFAQVKQIYKTPPIKDFGGFNFSQILPDPSKPSKRSFIEDLLFNKVTLADAGFIKQYGDCLGDIAARDLICAQKFNGLNVLPPLLTDEMIAQYTSALLAGTITSGWTFGAGAALQIPFAMQMAYRFNGIGVTQNVLYENQKLIANQFNSAIGKIQDSLSSTASALGKLQDVVNQNAQALNTLVKQLSSNFGAISSVLNDILSRLDKVEAEVQIDRLITGRLQSLQTYVTQQLIRAAEIRASANLAATKMSECVLGQSKRVDFCGKGYHLMSFPQSAPHGVVFLHVTYVPAQEKNFTTAPAICHDGKAHFPREGVFVSNGTHWFVTQRNFYEPQIITTDNTFVSGNCDVVIGIVNNTVYDPLQPELDSFKEELDKYFKNHTSPDVDLGDISGINASVVNIQKEIDRLNEVAKNLNESLIDLQELGKYEQYIKWPWYIWLGFIAGLIAIVMVTIMLCCMTSCCSCLKGCCSCGSCCKFDEDDSEPVLKGVKLHYT

SEQ ID NO: 17 - DNA, 1260 bp, synthetic construct
  source 1..1260: mol_type = other DNA
atgtctgataacggaccacagaatcagcgaaacgcaccacgcattacgtttggtggaccctcagattcaactggcagtaaccagaatggagaacgcagtggagcgcgatctaaacaacgtcggcctcaaggtttacccaataatactgcgtcttggttcaccgctctcactcaacatggcaaggaaggccttaaattccctcgaggacaaggcgttccaattaacaccaatagcagtccagatgaccaaattggctactaccgaagagctaccagacgaattcgtggtggtgacggtaagatgaaagatctcagtccaagatggtatttctactacctaggaactgggccagaagctggacttccctatggtgctaacaaagacggcatcatatgggttgcaactgagggagccttgaatacacctaaagatcacattggcacccgcaatcctgctaacaatgctgcaatcgtgctacaacttcctcaaggaacaacattgcctaaaggcttctacgcagaagggagcagaggcggcagtcaagcctcttctcgttcctcatcacgtagtcgcaacagttcaagaaattcaactccaggcagcagtatgggaacttctcctgctagaatggctggcaatggctgtgatgctgctcttgctttgctgctgcttgacagattgaaccagcttgagagcaagatgtctggtaaaggccaacaacaacaaggccaaactgtcactaagaaatctgctgctgaggcttctaagaagcctcggcagaaacgtactgccactaaagcatacaatgtaacacaagctttcggcagacgtggtccagaacaaacccaaggaaactttggagaccaggaactaatcagacaaggaactgattacaaacattggccgcaaattgcacaatttgctcccagcgcttcagcgttcttcggaatgtcgcgcattggcatggaagtcacaccttcgggaacgtggttgacctacacaggtgccatcaaattggatgacaaagatccaaatttcaaagatcaagtcatattgctgaataagcatattgacgcatacaagacattcccaccaacagagcctaagaaggacaagaagaagaaggcttatgaaactcaagccttaccgcagagacagaagaaacagcaaactgtgactcttcttcctgctgcagatttggatgatttctccaaacaattgcaacaatccatgagcagtgctgactcaactcaggcctaa

SEQ ID NO: 18 - protein, 419 aa, synthetic construct
MSDNGPQNQRNAPRITFGGPSDSTGSNQNGERSGARSKQRRPQGLPNNTASWFTALTQHGKEGLKFPRGQGVPINTNSSPDDQIGYYRRATRRIRGGDGKMKDLSPRWYFYYLGTGPEAGLPYGANKDGIIWVATEGALNTPKDHIGTRNPANNAAIVLQLPQGTTLPKGFYAEGSRGGSQASSRSSSRSRNSSRNSTPGSSMGTSPARMAGNGCDAALALLLLDRLNQLESKMSGKGQQQQGQTVTKKSAAEASKKPRQKRTATKAYNVTQAFGRRGPEQTQGNFGDQELIRQGTDYKHWPQIAQFAPSASAFFGMSRIGMEVTPSGTWLTYTGAIKLDDKDPNFKDQVILLNKHIDAYKTFPPTEPKKDKKKKAYETQALPQRQKKQQTVTLLPAADLDDFSKQLQQSMSSADSTQA

SEQ ID NO: 19 - DNA, 1260 bp, synthetic construct
  source 1..1260: mol_type = other DNA
atgtctgataacggaccacagaatcagcgaaacgcactacgcattacgtttggtggaccctcagattcaactggcagtaaccagaatggagaacgcagtggagcgcgatctaaacaacgtcggcctcaaggtttacccaataatactgcgtcttggttcaccgctctcactcaacatggcaaggaagaccttaaattccctcgaggacaaggcgttccaattaacaccaatagcagtccagatgaccaaattggctactaccgaagagctaccagacgaattcgtggtggtgacggtaagatgaaagatctcagtccaagatggtatttctactacctaggaactgggccagaagctggacttccctatggtgctaacaaagacggcatcatatgggttgcaactgagggagccttgaatacacctaaagatcacattggcacccgcaatcctgctaacaatgctgcaatcgtgctacaacttcctcaaggaacaacattgcctaaaggcttctacgcagaagggagcagaggcggcagtcaagcctcttctcgttcctcatcacgtagtcgcaacagttcaagaaattcaactccaggcagcagtaaacgaacttctcctgctagaatggctggcaatggcggtgatgctgctcttgctttgctgctgcttgacagattgaaccagcttgagagcaagatgtctggtaaaggccaacaacaacaaggccaaactgtcactaagaaatctgctgctgaggcttctaagaagcctcggcagaaacgtactgccactaaagcatacaatgtaacacaagctttcggcagacgtggtccagaacaaacccaaggaaactttggagaccaggaactaatcagacaaggaactgattacaaacattggccgcaaattgcacaatttgctcccagcgcttcagcgttcttcggaatgtcgcgcattggcatggaagtcacaccttcgggaacgtggttgacctacacaggtgccatcaaattggatgacaaagatccaaatttcaaagatcaagtcatattgctgaataagcatattgacgcatacaagacattcccaccaacagagcctaagaaggacaagaagaagaaggctgatgaaactcaagccttaccgcacagacagaagaaacagcaaactgtgactcttcttcctgctgcagatttggatgatttctccaaacaattgcaacaatccatgagcagtgctgactcaactcaggcctaa

SEQ ID NO: 20 - protein, 419 aa, synthetic construct
MSDNGPQNQRNALRITFGGPSDSTGSNQNGERSGARSKQRRPQGLPNNTASWFTALTQHGKEDLKFPRGQGVPINTNSSPDDQIGYYRRATRRIRGGDGKMKDLSPRWYFYYLGTGPEAGLPYGANKDGIIWVATEGALNTPKDHIGTRNPANNAAIVLQLPQGTTLPKGFYAEGSRGGSQASSRSSSRSRNSSRNSTPGSSKRTSPARMAGNGGDAALALLLLDRLNQLESKMSGKGQQQQGQTVTKKSAAEASKKPRQKRTATKAYNVTQAFGRRGPEQTQGNFGDQELIRQGTDYKHWPQIAQFAPSASAFFGMSRIGMEVTPSGTWLTYTGAIKLDDKDPNFKDQVILLNKHIDAYKTFPPTEPKKDKKKKADETQALPHRQKKQQTVTLLPAADLDDFSKQLQQSMSSADSTQA

SEQ ID NO: 21 - DNA, 3813 bp, synthetic construct
  source 1..3813: mol_type = other DNA
atgtttgtctttcttgtcttattgccactagtctctagtcagtgtgttaactttacaaccagaactcaattaccacctgcatacactaattctttcacacgtggtgtttattaccctgacaaagtattcagatcctcagtattacattcaactcaggacttgttcttacctttcttctccaatgttacttggttccatgctatacatgtctctgggaccaatggtactaagaggtttgctaaccctgtcctaccatttaatgatggtgtttatttcgcttccactgagaagtctaacataataagaggctggatatttggtactactttagattcgaagacccagtccctacttattgttaataacgctactaatgttgttattaaagtctgtgaatttcaattctgtaatgatccattcttgggtgtttattaccacaagaacaacaagagttggatggaaagtgagttcagagtttattctagtgcgaataattgcactttcgaatatgtctctcagcctttccttatggaccttgaaggtaaacagggtaatttcaagaatcttagggaatttgtgtttaagaatattgatggttatttcaagatatattctaagcacacgcctattaatttagtgcgtggtctccctcagggtttctcggctttagaaccattggtagatttgccaataggtattaacatcactaggtttcaaactttacatataagttatttgactcctggtgattcttcttcaggttggacagctggtgctgcagcttattatgtgggttatcttcaacctaggactttcctattgaaatataatgagaatggaaccattacagatgctgtagactgtgcacttgaccctctctcagaaacaaagtgtacgttgaaatccttcactgtagagaaaggaatctatcaaacttctaactttagagtccaaccaacagaatctattgttagatttcctaatattacaaacttgtgccctttcggtgaagtatttaacgccaccagatttgcatctgtttatgcttggaacaggaagagaatcagcaactgtgttgctgattattctgtcctatataattccgcatcattctccacatttaagtgttatggagtgtctcctactaaattaaatgatctctgctttactaatgtctatgcagattcatttgtaattagaggtgatgaagtcagacaaatcgctccagggcaaactggaaatattgctgattataattataaattaccagatgactttacaggctgcgttatagcttggaattctaacaatcttgattctaaggttggtggtaattataattacctgtatagattgtttaggaagtctaatctcaaacctttcgagagagatatttcaactgaaatctatcaggccggtagcacaccttgtaatggtgttaaaggatttaattgttactttcctttacaatcatatggtttccaacccacttatggtgttggttaccaaccatacagagtagtagtactttcatttgaacttctacatgcaccagcaactgtttgtggacctaagaagtctactaatttggttaagaacaaatgtgtcaatttcaacttcaatggtttaacaggcacaggtgttcttactgagtctaacaagaagtttctgcctttccaacaatttggcagagacattgctgacactactgatgctgtccgtgatccacagacacttgagattcttgacattacaccatgttcatttggtggtgtcagtgttataacaccaggaacaaatacttctaaccaggttgctgttctttatcagggtgttaactgcacagaagtccctgttgctattcatgcagatcaacttactcctacttggcgtgtttattctacaggttctaatgtatttcaaacacgtgcaggctgtttaataggagctgaacatgtcaacaactcatatgagtgtgacatacccattggtgcaggtatatgcgctagttatcagactcagactaattctcctcggcgggcacgtagtgtagctagtcaatccatcattgcctacactatgtcacttggtgtagagaattcagttgcttactctaataactctattgccatacccacaaactttactattagtgttaccacagaaattctaccagtgtctatgaccaagacatcagtagattgtacaatgtacatttgtggtgattcaactgaatgcagcaatctattgttgcaatatggcagtttctgtacacaattaaaccgtgctttaactggaatagctgttgaacaagacaagaacacccaagaagtatttgcacaagtcaaacaaatttacaagacaccaccaattaaagatttcggtggatttaatttctcacaaatattaccagatccatctaaaccaagcaagaggtcatttattgaagatctactattcaacaaagtgacacttgcagatgctggcttcatcaaacaatatggtgattgccttggtgatattgctgctagagacctcatttgtgcacagaagtttaacggccttactgtattgccacctttgctcacagatgaaatgattgctcaatacacttctgcactgttagcgggtacaatcacttctggttggacctttggtgcaggtgctgcattacaaataccatttgctatgcaaatggcttataggtttaatggtattggagttacacagaatgttctctatgagaaccagaaattgattgccaaccaatttaatagtgctattggcaagattcaagactcactttcttccacagcaagtgcacttggtaaacttcaagatgtggtcaaccagaatgcacaagctttaaacacgcttgttaaacaacttagctccaactttggtgcaatttcaagtgtattaaatgatatcctttcacgtcttgacaaagttgaggctgaagtgcaaattgataggttgatcacaggcagacttcaaagtttgcagacatatgtgactcaacaattaattagagctgcagaaatcagagcttctgctaatcttgctgctactaagatgtcagagtgtgtacttggacaatctaagagagttgatttctgtggaaagggctatcatcttatgtccttccctcagtcagcacctcatggtgtagtcttcttgcatgtgacttatgtccctgcacaagagaagaacttcacaactgctcctgccatttgtcatgatggtaaagcacactttcctcgtgaaggtgtctttgtttcaaatggcacacactggtttgtaacacaaaggaatttctatgaaccacaaatcattactacagacaacacatttgtgtctggtaactgtgatgttgtaataggaattgtcaacaacacagtttatgatcctttgcaacctgaattagactcattcaaggaggagttagataaatatttcaagaatcatacatcaccagatgttgatttaggtgacatctctggcattaatgcttcagttgtaaacattcagaaagaaattgaccgcctcaatgaggttgccaagaatttaaatgaatctctcatcgatctccaagaacttggaaagtatgagcagtatatcaaatggccatggtacatttggctaggtttcatagctggcttgattgccatagtaatggtgacaattatgctttgctgtatgaccagttgctgtagttgtctcaagggctgttgttcttgtggatcctgctgcaaatttgatgaagacgactctgagccagtgctcaaaggagtcaaattacattacacataa

SEQ ID NO: 22 - protein, 1270 aa, synthetic construct
MFVFLVLLPLVSSQCVNFTTRTQLPPAYTNSFTRGVYYPDKVFRSSVLHSTQDLFLPFFSNVTWFHAIHVSGTNGTKRFANPVLPFNDGVYFASTEKSNIIRGWIFGTTLDSKTQSLLIVNNATNVVIKVCEFQFCNDPFLGVYYHKNNKSWMESEFRVYSSANNCTFEYVSQPFLMDLEGKQGNFKNLREFVFKNIDGYFKIYSKHTPINLVRGLPQGFSALEPLVDLPIGINITRFQTLHISYLTPGDSSSGWTAGAAAYYVGYLQPRTFLLKYNENGTITDAVDCALDPLSETKCTLKSFTVEKGIYQTSNFRVQPTESIVRFPNITNLCPFGEVFNATRFASVYAWNRKRISNCVADYSVLYNSASFSTFKCYGVSPTKLNDLCFTNVYADSFVIRGDEVRQIAPGQTGNIADYNYKLPDDFTGCVIAWNSNNLDSKVGGNYNYLYRLFRKSNLKPFERDISTEIYQAGSTPCNGVKGFNCYFPLQSYGFQPTYGVGYQPYRVVVLSFELLHAPATVCGPKKSTNLVKNKCVNFNFNGLTGTGVLTESNKKFLPFQQFGRDIADTTDAVRDPQTLEILDITPCSFGGVSVITPGTNTSNQVAVLYQGVNCTEVPVAIHADQLTPTWRVYSTGSNVFQTRAGCLIGAEHVNNSYECDIPIGAGICASYQTQTNSPRRARSVASQSIIAYTMSLGVENSVAYSNNSIAIPTNFTISVTTEILPVSMTKTSVDCTMYICGDSTECSNLLLQYGSFCTQLNRALTGIAVEQDKNTQEVFAQVKQIYKTPPIKDFGGFNFSQILPDPSKPSKRSFIEDLLFNKVTLADAGFIKQYGDCLGDIAARDLICAQKFNGLTVLPPLLTDEMIAQYTSALLAGTITSGWTFGAGAALQIPFAMQMAYRFNGIGVTQNVLYENQKLIANQFNSAIGKIQDSLSSTASALGKLQDVVNQNAQALNTLVKQLSSNFGAISSVLNDILSRLDKVEAEVQIDRLITGRLQSLQTYVTQQLIRAAEIRASANLAATKMSECVLGQSKRVDFCGKGYHLMSFPQSAPHGVVFLHVTYVPAQEKNFTTAPAICHDGKAHFPREGVFVSNGTHWFVTQRNFYEPQIITTDNTFVSGNCDVVIGIVNNTVYDPLQPELDSFKEELDKYFKNHTSPDVDLGDISGINASVVNIQKEIDRLNEVAKNLNESLIDLQELGKYEQYIKWPWYIWLGFIAGLIAIVMVTIMLCCMTSCCSCLKGCCSCGSCCKFDEDDSEPVLKGVKLHYT

SEQ ID NO: 23 - DNA, 1260 bp, synthetic construct
  source 1..1260: mol_type = other DNA
atgtctgataacggaccacagaatcagcgaaacgcaccacgcattacgtttggtggaccctcagattcaactggcagtaaccagaatggagaacgcagtggagcgcgatctaaacaacgtcggcctcaaggtttacccaataatactgcgtcttggttcaccgctctcactcaacatggcaaggaagaccttaaattccctcgaggacaaggcgttccaattaacaccaatagcagtccagatgaccaaattggctactaccgaagagctaccagacgaattcgtggtggtgacggtaagatgaaagatctcagtccaagatggtatttctactacctaggaactgggccagaagctggacttccctatggtgctaacaaagacggcatcatatgggttgcaactgagggagccttgaatacacctaaagatcacattggcacccgcaatcctgctaacaatgctgcaatcgtgctacaacttcctcaaggaacaacattgcctaaaggcttctacgcagaagggagcagaggcggcagtcaagcctcttctcgttcctcatcacgtagtcgcaacagttcaagaaattcaactccaggcagcagtagaggaatctctcctgctagaatggctggcaatggcggtgatgctgctcttgctttgctgctgcttgacagattgaaccagcttgagagcaagatgtctggtaaaggccaacaacaacaaggccaaactgtcactaagaaatctgctgctgaggcttctaagaagcctcggcagaaacgtactgccactaaagcatacaatgtaacacaagctttcggcagacgtggtccagaacaaacccaaggaaactttggagaccaggaactaatcagacaaggaactgattacaaacattggccgcaaattgcacaatttgctcccagcgcttcagcgttcttcggaatgtcgcgcattggcatggaagtcacaccttcgggaacgtggttgacctacacaggtgccatcaaattggatgacaaagatccaaatttcaaagatcaagtcatattgctgaataagcatattgacgcatacaagacattcccaccaacagagcctaagaaggacaagaagaagaaggctgatgaaactcaagccttaccgcagagacagaagaaacagcaaactgtgactcttcttcctgctgcagatttggatgatttctccaaacaattgcaacaatccatgagcagtgctgactcaactcaggcctaa

SEQ ID NO: 24 - protein, 419 aa, synthetic construct
MSDNGPQNQRNAPRITFGGPSDSTGSNQNGERSGARSKQRRPQGLPNNTASWFTALTQHGKEDLKFPRGQGVPINTNSSPDDQIGYYRRATRRIRGGDGKMKDLSPRWYFYYLGTGPEAGLPYGANKDGIIWVATEGALNTPKDHIGTRNPANNAAIVLQLPQGTTLPKGFYAEGSRGGSQASSRSSSRSRNSSRNSTPGSSRGISPARMAGNGGDAALALLLLDRLNQLESKMSGKGQQQQGQTVTKKSAAEASKKPRQKRTATKAYNVTQAFGRRGPEQTQGNFGDQELIRQGTDYKHWPQIAQFAPSASAFFGMSRIGMEVTPSGTWLTYTGAIKLDDKDPNFKDQVILLNKHIDAYKTFPPTEPKKDKKKKADETQALPQRQKKQQTVTLLPAADLDDFSKQLQQSMSSADSTQA

SEQ ID NO: 25 - DNA, 3813 bp, synthetic construct
  source 1..3813: mol_type = other DNA
atgtttgtctttcttgtcttattgccactagtctctagtcagtgtgttaatcttacaaccagaactcaattaccacctgcatacactaattctttcacacgtggtgtttattaccctgacaaagtattcagatcctcagtattacattcaactcaggacttgttcttacctttcttctccaatgttacttggttccatgttatatctgggaccaatggtactaagaggtttgataaccctgtcctaccatttaatgatggtgtttatttcgcttccattgagaagtctaacataataagaggctggatatttggtactactttagattcgaagacccagtccctacttattgttaataacgctactaatgttgttattaaagtctgtgaatttcaattctgtaatgatccattcttggatcacaagaacaacaagagttggatggaaagtgagttcagagtttattctagtgcgaataattgcactttcgaatatgtctctcagcctttccttatggaccttgaaggtaaacagggtaatttcaagaatcttagggaatttgtgtttaagaatattgatggttatttcaagatatattctaagcacacgcctattatagtgcgtgaacctgaagatctccctcagggtttctcggctttagaaccattggtagatttgccaataggtattaacatcactaggtttcaaactttacttgctttacatagaagttatttgactcctggtgattcttcttcaggttggacagctggtgctgcagcttattatgtgggttatcttcaacctaggactttcctattgaaatataatgagaatggaaccattacagatgctgtagactgtgcacttgaccctctctcagaaacaaagtgtacgttgaaatccttcactgtagagaaaggaatctatcaaacttctaactttagagtccaaccaacagaatctattgttagatttcctaatattacaaacttgtgccctttcgacgaagtatttaacgccaccagatttgcatctgtttatgcttggaacaggaagagaatcagcaactgtgttgctgattattctgtcctatataatctcgcaccattcttcacatttaagtgttatggagtgtctcctactaaattaaatgatctctgctttactaatgtctatgcagattcatttgtaattagaggtgatgaagtcagacaaatcgctccagggcaaactggaaatattgctgattataattataaattaccagatgactttacaggctgcgttatagcttggaattctaacaaacttgattctaaggttagtggtaattataattacctgtatagattgtttaggaagtctaatctcaaacctttcgagagagatatttcaactgaaatctatcaggccggtaacaaaccttgtaatggtgttgcaggatttaattgttactttcctttacgatcatatagtttccgacccacttatggtgttggtcaccaaccatacagagtagtagtactttcatttgaacttctacatgcaccagcaactgtttgtggacctaagaagtctactaatttggttaagaacaaatgtgtcaatttcaacttcaatggtttgaaaggcacaggtgttcttactgagtctaacaagaagtttctgcctttccaacaatttggcagagacattgctgacactactgatgctgtccgtgatccacagacacttgagattcttgacattacaccatgttcatttggtggtgtcagtgttataacaccaggaacaaatacttctaaccaggttgctgttctttatcagggtgttaactgcacagaagtccctgttgctattcatgcagatcaacttactcctacttggcgtgtttattctacaggttctaatgtatttcaaacacgtgcaggctgtttaataggagctgaatatgtcaacaactcatatgagtgtgacatacccattggtgcaggtatatgcgctagttatcagactcagactaagtctcatcggcgggcacgtagtgtagctagtcaatccatcattgcctacactatgtcacttggtgcagagaattcagttgcttactctaataactctattgccatacccacaaactttactattagtgttaccacagaaattctaccagtgtctatgaccaagacatcagtagattgtacaatgtacatttgtggtgattcaactgaatgcagcaatctattgttgcaatatggcagtttctgtacacaattaaagcgtgctttaactggaatagctgttgaacaagacaagaacacccaagaagtatttgcacaagtcaaacaaatttacaagacaccaccaattaagtatttcggtggatttaatttctcacaaatattaccagatccatctaaaccaagcaagaggtcatttattgaagatctactattcaacaaagtgacacttgcagatgctggcttcatcaaacaatatggtgattgccttggtgatattgctgctagagacctcatttgtgcacagaagtttaagggccttactgtattgccacctttgctcacagatgaaatgattgctcaatacacttctgcactgttagcgggtacaatcacttctggttggacctttggtgcaggtgctgcattacaaataccatttgctatgcaaatggcttataggtttaatggtattggagttacacagaatgttctctatgagaaccagaaattgattgccaaccaatttaatagtgctattggcaagattcaagactcactttcttccacagcaagtgcacttggtaaacttcaagatgtggtcaaccacaatgcacaagctttaaacacgcttgttaaacaacttagctccaagtttggtgcaatttcaagtgtattaaatgatatcttctcacgtcttgacaaagttgaggctgaagtgcaaattgataggttgatcacaggcagacttcaaagtttgcagacatatgtgactcaacaattaattagagctgcagaaatcagagcttctgctaatcttgctgctactaagatgtcagagtgtgtacttggacaatctaagagagttgatttctgtggaaagggctatcatcttatgtccttccctcagtcagcacctcatggtgtagtcttcttgcatgtgacttatgtccctgcacaagagaagaacttcacaactgctcctgccatttgtcatgatggtaaagcacactttcctcgtgaaggtgtctttgtttcaaatggcacacactggtttgtaacacaaaggaatttctatgaaccacaaatcattactacagacaacacatttgtgtctggtaactgtgatgttgtaataggaattgtcaacaacacagtttatgatcctttgcaacctgaattagactcattcaaggaggagttagataaatatttcaagaatcatacatcaccagatgttgatttaggtgacatctctggcattaatgcttcagttgtaaacattcagaaagaaattgaccgcctcaatgaggttgccaagaatttaaatgaatctctcatcgatctccaagaacttggaaagtatgagcagtatatcaaatggccatggtacatttggctaggtttcatagctggcttgattgccatagtaatggtgacaattatgctttgctgtatgaccagttgctgtagttgtctcaagggctgttgttcttgtggatcctgctgcaaatttgatgaagacgactctgagccagtgctcaaaggagtcaaattacattacacataa

SEQ ID NO: 26 - protein, 1270 aa, synthetic construct
MFVFLVLLPLVSSQCVNLTTRTQLPPAYTNSFTRGVYYPDKVFRSSVLHSTQDLFLPFFSNVTWFHVISGTNGTKRFDNPVLPFNDGVYFASIEKSNIIRGWIFGTTLDSKTQSLLIVNNATNVVIKVCEFQFCNDPFLDHKNNKSWMESEFRVYSSANNCTFEYVSQPFLMDLEGKQGNFKNLREFVFKNIDGYFKIYSKHTPIIVREPEDLPQGFSALEPLVDLPIGINITRFQTLLALHRSYLTPGDSSSGWTAGAAAYYVGYLQPRTFLLKYNENGTITDAVDCALDPLSETKCTLKSFTVEKGIYQTSNFRVQPTESIVRFPNITNLCPFDEVFNATRFASVYAWNRKRISNCVADYSVLYNLAPFFTFKCYGVSPTKLNDLCFTNVYADSFVIRGDEVRQIAPGQTGNIADYNYKLPDDFTGCVIAWNSNKLDSKVSGNYNYLYRLFRKSNLKPFERDISTEIYQAGNKPCNGVAGFNCYFPLRSYSFRPTYGVGHQPYRVVVLSFELLHAPATVCGPKKSTNLVKNKCVNFNFNGLKGTGVLTESNKKFLPFQQFGRDIADTTDAVRDPQTLEILDITPCSFGGVSVITPGTNTSNQVAVLYQGVNCTEVPVAIHADQLTPTWRVYSTGSNVFQTRAGCLIGAEYVNNSYECDIPIGAGICASYQTQTKSHRRARSVASQSIIAYTMSLGAENSVAYSNNSIAIPTNFTISVTTEILPVSMTKTSVDCTMYICGDSTECSNLLLQYGSFCTQLKRALTGIAVEQDKNTQEVFAQVKQIYKTPPIKYFGGFNFSQILPDPSKPSKRSFIEDLLFNKVTLADAGFIKQYGDCLGDIAARDLICAQKFKGLTVLPPLLTDEMIAQYTSALLAGTITSGWTFGAGAALQIPFAMQMAYRFNGIGVTQNVLYENQKLIANQFNSAIGKIQDSLSSTASALGKLQDVVNHNAQALNTLVKQLSSKFGAISSVLNDIFSRLDKVEAEVQIDRLITGRLQSLQTYVTQQLIRAAEIRASANLAATKMSECVLGQSKRVDFCGKGYHLMSFPQSAPHGVVFLHVTYVPAQEKNFTTAPAICHDGKAHFPREGVFVSNGTHWFVTQRNFYEPQIITTDNTFVSGNCDVVIGIVNNTVYDPLQPELDSFKEELDKYFKNHTSPDVDLGDISGINASVVNIQKEIDRLNEVAKNLNESLIDLQELGKYEQYIKWPWYIWLGFIAGLIAIVMVTIMLCCMTSCCSCLKGCCSCGSCCKFDEDDSEPVLKGVKLHYT

SEQ ID NO: 27 - DNA, 1251 bp, synthetic construct
  source 1..1251: mol_type = other DNA
atgtctgataacggaccacagaatcagcgaaacgcactacgcattacgtttggtggaccctcagattcaactggcagtaaccagaatggaggagcgcgatctaaacaacgtcggcctcaaggtttacccaataatactgcgtcttggttcaccgctctcactcaacatggcaaggaagaccttaaattccctcgaggacaaggcgttccaattaacaccaatagcagtccagatgaccaaattggctactaccgaagagctaccagacgaattcgtggtggtgacggtaagatgaaagatctcagtccaagatggtatttctactacctaggaactgggccagaagctggacttccctatggtgctaacaaagacggcatcatatgggttgcaactgagggagccttgaatacacctaaagatcacattggcacccgcaatcctgctaacaatgctgcaatcgtgctacaacttcctcaaggaacaacattgcctaaaggcttctacgcagaagggagcagaggcggcagtcaagcctcttctcgttcctcatcacgtagtcgcaacagttcaagaaattcaactccaggcagcagtaaacgaacttctcctgctagaatggctggcaatggcggtgatgctgctcttgctttgctgctgcttgacagattgaaccagcttgagagcaagatgtctggtaaaggccaacaacaacaaggccaaactgtcactaagaaatctgctgctgaggcttctaagaagcctcggcagaaacgtactgccactaaagcatacaatgtaacacaagctttcggcagacgtggtccagaacaaacccaaggaaactttggagaccaggaactaatcagacaaggaactgattacaaacattggccgcaaattgcacaatttgctcccagcgcttcagcgttcttcggaatgtcgcgcattggcatggaagtcacaccttcgggaacgtggttgacctacacaggtgccatcaaattggatgacaaagatccaaatttcaaagatcaagtcatattgctgaataagcatattgacgcatacaagacattcccaccaacagagcctaagaaggacaagaagaagaaggctgatgaaactcaagccttaccgcagagacagaagaaacagcaaactgtgactcttcttcctgctgcagatttggatgatttctccaaacaattgcaacaatccatgagcagtgctgactcaactcaggcctaa

SEQ ID NO: 28 - protein, 416 aa, synthetic construct
MSDNGPQNQRNALRITFGGPSDSTGSNQNGGARSKQRRPQGLPNNTASWFTALTQHGKEDLKFPRGQGVPINTNSSPDDQIGYYRRATRRIRGGDGKMKDLSPRWYFYYLGTGPEAGLPYGANKDGIIWVATEGALNTPKDHIGTRNPANNAAIVLQLPQGTTLPKGFYAEGSRGGSQASSRSSSRSRNSSRNSTPGSSKRTSPARMAGNGGDAALALLLLDRLNQLESKMSGKGQQQQGQTVTKKSAAEASKKPRQKRTATKAYNVTQAFGRRGPEQTQGNFGDQELIRQGTDYKHWPQIAQFAPSASAFFGMSRIGMEVTPSGTWLTYTGAIKLDDKDPNFKDQVILLNKHIDAYKTFPPTEPKKDKKKKADETQALPQRQKKQQTVTLLPAADLDDFSKQLQQSMSSADSTQA

SEQ ID NO: 29 - DNA, 3822 bp, synthetic construct
  source 1..3822: mol_type = other DNA
atgtttgtctttcttgtcttattgccactagtctctagtcagtgtgttaactttacaaacagaactcaattaccatctgcatacactaattctttcacacgtggtgtttattaccctgacaaagtattcagatcctcagtattacattcaactcaggacttgttcttacctttcttctccaatgttacttggttccatgctatacatgtctctgggaccaatggtactaagaggtttgataaccctgtcctaccatttaatgatggtgtttatttcgcttccactgagaagtctaacataataagaggctggatatttggtactactttagattcgaagacccagtccctacttattgttaataacgctactaatgttgttattaaagtctgtgaatttcaattctgtaattatccattcttgggtgtttattaccacaagaacaacaagagttggatggaaagtgagttcagagtttattctagtgcgaataattgcactttcgaatatgtctctcagcctttccttatggaccttgaaggtaaacagggtaatttcaagaatcttagcgaatttgtgtttaagaatattgatggttatttcaagatatattctaagcacacgcctattaatttagtgcgtgatctccctcagggtttctcggctttagaaccattggtagatttgccaataggtattaacatcactaggtttcaaactttacttgctttacatagaagttatttgactcctggtgattcttcttcaggttggacagctggtgctgcagcttattatgtgggttatcttcaacctaggactttcctattgaaatataatgagaatggaaccattacagatgctgtagactgtgcacttgaccctctctcagaaacaaagtgtacgttgaaatccttcactgtagagaaaggaatctatcaaacttctaactttagagtccaaccaacagaatctattgttagatttcctaatattacaaacttgtgccctttcggtgaagtatttaacgccaccagatttgcatctgtttatgcttggaacaggaagagaatcagcaactgtgttgctgattattctgtcctatataattccgcatcattctccacatttaagtgttatggagtgtctcctactaaattaaatgatctctgctttactaatgtctatgcagattcatttgtaattagaggtgatgaagtcagacaaatcgctccagggcaaactggaacgattgctgattataattataaattaccagatgactttacaggctgcgttatagcttggaattctaacaatcttgattctaaggttggtggtaattataattacctgtatagattgtttaggaagtctaatctcaaacctttcgagagagatatttcaactgaaatctatcaggccggtagcacaccttgtaatggtgttaaaggatttaattgttactttcctttacaatcatatggtttccaacccacttatggtgttggttaccaaccatacagagtagtagtactttcatttgaacttctacatgcaccagcaactgtttgtggacctaagaagtctactaatttggttaagaacaaatgtgtcaatttcaacttcaatggtttaacaggcacaggtgttcttactgagtctaacaagaagtttctgcctttccaacaatttggcagagacattgctgacactactgatgctgtccgtgatccacagacacttgagattcttgacattacaccatgttcatttggtggtgtcagtgttataacaccaggaacaaatacttctaaccaggttgctgttctttatcagggtgttaactgcacagaagtccctgttgctattcatgcagatcaacttactcctacttggcgtgtttattctacaggttctaatgtatttcaaacacgtgcaggctgtttaataggagctgaatatgtcaacaactcatatgagtgtgacatacccattggtgcaggtatatgcgctagttatcagactcagactaattctcctcggcgggcacgtagtgtagctagtcaatccatcattgcctacactatgtcacttggtgcagagaattcagttgcttactctaataactctattgccatacccacaaactttactattagtgttaccacagaaattctaccagtgtctatgaccaagacatcagtagattgtacaatgtacatttgtggtgattcaactgaatgcagcaatctattgttgcaatatggcagtttctgtacacaattaaaccgtgctttaactggaatagctgttgaacaagacaagaacacccaagaagtatttgcacaagtcaaacaaatttacaagacaccaccaattaaagatttcggtggatttaatttctcacaaatattaccagatccatctaaaccaagcaagaggtcatttattgaagatctactattcaacaaagtgacacttgcagatgctggcttcatcaaacaatatggtgattgccttggtgatattgctgctagagacctcatttgtgcacagaagtttaacggccttactgtattgccacctttgctcacagatgaaatgattgctcaatacacttctgcactgttagcgggtacaatcacttctggttggacctttggtgcaggtgctgcattacaaataccatttgctatgcaaatggcttataggtttaatggtattggagttacacagaatgttctctatgagaaccagaaattgattgccaaccaatttaatagtgctattggcaagattcaagactcactttcttccacagcaagtgcacttggtaaacttcaagatgtggtcaaccagaatgcacaagctttaaacacgcttgttaaacaacttagctccaactttggtgcaatttcaagtgtattaaatgatatcctttcacgtcttgacaaagttgaggctgaagtgcaaattgataggttgatcacaggcagacttcaaagtttgcagacatatgtgactcaacaattaattagagctgcagaaatcagagcttctgctaatcttgctgctattaagatgtcagagtgtgtacttggacaatctaagagagttgatttctgtggaaagggctatcatcttatgtccttccctcagtcagcacctcatggtgtagtcttcttgcatgtgacttatgtccctgcacaagagaagaacttcacaactgctcctgccatttgtcatgatggtaaagcacactttcctcgtgaaggtgtctttgtttcaaatggcacacactggtttgtaacacaaaggaatttctatgaaccacaaatcattactacagacaacacatttgtgtctggtaactgtgatgttgtaataggaattgtcaacaacacagtttatgatcctttgcaacctgaattagactcattcaaggaggagttagataaatatttcaagaatcatacatcaccagatgttgatttaggtgacatctctggcattaatgcttcatttgtaaacattcagaaagaaattgaccgcctcaatgaggttgccaagaatttaaatgaatctctcatcgatctccaagaacttggaaagtatgagcagtatatcaaatggccatggtacatttggctaggtttcatagctggcttgattgccatagtaatggtgacaattatgctttgctgtatgaccagttgctgtagttgtctcaagggctgttgttcttgtggatcctgctgcaaatttgatgaagacgactctgagccagtgctcaaaggagtcaaattacattacacataa

SEQ ID NO: 30 - protein, 1273 aa, synthetic construct
MFVFLVLLPLVSSQCVNFTNRTQLPSAYTNSFTRGVYYPDKVFRSSVLHSTQDLFLPFFSNVTWFHAIHVSGTNGTKRFDNPVLPFNDGVYFASTEKSNIIRGWIFGTTLDSKTQSLLIVNNATNVVIKVCEFQFCNYPFLGVYYHKNNKSWMESEFRVYSSANNCTFEYVSQPFLMDLEGKQGNFKNLSEFVFKNIDGYFKIYSKHTPINLVRDLPQGFSALEPLVDLPIGINITRFQTLLALHRSYLTPGDSSSGWTAGAAAYYVGYLQPRTFLLKYNENGTITDAVDCALDPLSETKCTLKSFTVEKGIYQTSNFRVQPTESIVRFPNITNLCPFGEVFNATRFASVYAWNRKRISNCVADYSVLYNSASFSTFKCYGVSPTKLNDLCFTNVYADSFVIRGDEVRQIAPGQTGTIADYNYKLPDDFTGCVIAWNSNNLDSKVGGNYNYLYRLFRKSNLKPFERDISTEIYQAGSTPCNGVKGFNCYFPLQSYGFQPTYGVGYQPYRVVVLSFELLHAPATVCGPKKSTNLVKNKCVNFNFNGLTGTGVLTESNKKFLPFQQFGRDIADTTDAVRDPQTLEILDITPCSFGGVSVITPGTNTSNQVAVLYQGVNCTEVPVAIHADQLTPTWRVYSTGSNVFQTRAGCLIGAEYVNNSYECDIPIGAGICASYQTQTNSPRRARSVASQSIIAYTMSLGAENSVAYSNNSIAIPTNFTISVTTEILPVSMTKTSVDCTMYICGDSTECSNLLLQYGSFCTQLNRALTGIAVEQDKNTQEVFAQVKQIYKTPPIKDFGGFNFSQILPDPSKPSKRSFIEDLLFNKVTLADAGFIKQYGDCLGDIAARDLICAQKFNGLTVLPPLLTDEMIAQYTSALLAGTITSGWTFGAGAALQIPFAMQMAYRFNGIGVTQNVLYENQKLIANQFNSAIGKIQDSLSSTASALGKLQDVVNQNAQALNTLVKQLSSNFGAISSVLNDILSRLDKVEAEVQIDRLITGRLQSLQTYVTQQLIRAAEIRASANLAAIKMSECVLGQSKRVDFCGKGYHLMSFPQSAPHGVVFLHVTYVPAQEKNFTTAPAICHDGKAHFPREGVFVSNGTHWFVTQRNFYEPQIITTDNTFVSGNCDVVIGIVNNTVYDPLQPELDSFKEELDKYFKNHTSPDVDLGDISGINASFVNIQKEIDRLNEVAKNLNESLIDLQELGKYEQYIKWPWYIWLGFIAGLIAIVMVTIMLCCMTSCCSCLKGCCSCGSCCKFDEDDSEPVLKGVKLHYT

SEQ ID NO: 31 - DNA, 1260 bp, synthetic construct
  source 1..1260: mol_type = other DNA
atgtctgataacggaccacagaatcagcgaaacgcaccacgcattacgtttggtggaccctcagattcaactggcagtaaccagaatggagaacgcagtggagcgcgatctaaacaacgtcggcctcaaggtttacccaataatactgcgtcttggttcaccgctctcactcaacatggcaaggaagaccttaaattccctcgaggacaaggcgttccaattaacaccaatagcagtcgagatgaccaaattggctactaccgaagagctaccagacgaattcgtggtggtgacggtaagatgaaagatctcagtccaagatggtatttctactacctaggaactgggccagaagctggacttccctatggtgctaacaaagacggcatcatatgggttgcaactgagggagccttgaatacacctaaagatcacattggcacccgcaatcctgctaacaatgctgcaatcgtgctacaacttcctcaaggaacaacattgcctaaaggcttctacgcagaagggagcagaggcggcagtcaagcctcttctcgttcctcatcacgtagtcgcaacagttcaagaaattcaactccaggcagcagtaaacgaacttctcctgctagaatggctggcaatggcggtgatgctgctcttgctttgctgctgcttgacagattgaaccagcttgagagcaagatgtctggtaaaggccaacaacaacaaggccaaactgtcactaagaaatctgctgctgaggcttctaagaagcctcggcagaaacgtactgccactaaagcatacaatgtaacacaagctttcggcagacgtggtccagaacaaacccaaggaaactttggagaccaggaactaatcagacaaggaactgattacaaacattggccgcaaattgcacaatttgctcccagcgcttcagcgttcttcggaatgtcgcgcattggcatggaagtcacaccttcgggaacgtggttgacctacacaggtgccatcaaattggatgacaaagatccaaatttcaaagatcaagtcatattgctgaataagcatattgacgcatacaagacattcccaccaacagagcctaagaaggacaagaagaagaaggctgatgaaactcaagccttaccgcagagacagaagaaacagcaaactgtgactcttcttcctgctgcagatttggatgatttctccaaacaattgcaacaatccatgagcagtgctgactcaactcaggcctaa

SEQ ID NO: 32 - protein, 419 aa, synthetic construct
MSDNGPQNQRNAPRITFGGPSDSTGSNQNGERSGARSKQRRPQGLPNNTASWFTALTQHGKEDLKFPRGQGVPINTNSSRDDQIGYYRRATRRIRGGDGKMKDLSPRWYFYYLGTGPEAGLPYGANKDGIIWVATEGALNTPKDHIGTRNPANNAAIVLQLPQGTTLPKGFYAEGSRGGSQASSRSSSRSRNSSRNSTPGSSKRTSPARMAGNGGDAALALLLLDRLNQLESKMSGKGQQQQGQTVTKKSAAEASKKPRQKRTATKAYNVTQAFGRRGPEQTQGNFGDQELIRQGTDYKHWPQIAQFAPSASAFFGMSRIGMEVTPSGTWLTYTGAIKLDDKDPNFKDQVILLNKHIDAYKTFPPTEPKKDKKKKADETQALPQRQKKQQTVTLLPAADLDDFSKQLQQSMSSADSTQA

SEQ ID NO: 33 - DNA, 171625 bp, synthetic construct
  source 1..171625: mol_type = other DNA
ttttatgagaccatcaaagagagaaagagaataaaaatattttttatgagaccatcaaagagagaaagagaataaaaatattttatgagaccatcaaagagagaaagagaataaaaatattttttatgagaccatcaaagagagaaagagaataaaaatattttatgagaccatcaaagagagaaagagaataaaaatattttttatgagaccatcaaagagagaaagagaataaaaatatttttgtatgagaccatcagaaagaggtttaatatttttgtgataccctgaaaggaaataggaatagtgtcataatcgtatcacactattgagacagaaaaagaagaagtcgcgagaggtaactttttgttttgcaaaccggaatatagtgtccggtacacttttttaattcgtggtgtgcctgaatcgttcgattaaccctactcatccaatttcagatgaatagagttatcgattcagacacacgctttgagttttgttgaatcgatgagtgaagtatcatcggttgcaccttcagatgccgatccgtcgacatacttgacctcaagttcagatgattccttgcacatgtctccgatacgaacgctaaactctagattcttgacacattttgtatcgacgatcgttgaaccgatgatatcttcgtaactcactttcttatgagagatgttagacccgagtactggatgggtcttgatgtcgctgtctttctcttcttcgctacatctgatgtcgatagacacctcacagtctttccatcagcggattctgagatggatttaatctgaggacatttggtgaatccaaagttcattctcagacctccaccgatgatggagtaataagtggtaggaggatctacatcctcgactgattccacctcgggatctggatctgactcggactctgtaatttccgttacggattggcaaatcttatcatcggtcggtgtttggtcttgctttgtgactttgataataacatcgattcccatatgatgtttgttttcttcttccgtacacgatgaggatgattgctgaagactggcaggcacatgcatgccagtacgatatattgtttcatgattgctattgattgagtactgttctttatgattctacttccttaccgtgcaataaattagaatatattttctacttttacgagaaattaattattgtatttatgggtgaaaaacttactataaaaagcgggtgggtttggaattagtgatcagtttatgtatatcgcaactaccgggcatatggctacattacccacatgataagagattgtatcagtttcgtagtcttgagtattggtattactatatagtatatagatgtcgacgctagagttactgtctccgaatgcggcatgatagtatcattctttgctttcgttaactgtttggaggaagaatctttgttattgcatttaatctcgaaattcagagtgcacacctttctcctgtaaagaaacctgaagtcgctaccttattaagaagacgggatcgcagtctttatgattcatagtaatagttagttccgacgttgagatggattcgctgagaccggtagtggtcgtccgagtacacgatgtgtcgttaactggatacaggttaatttccacatcgatatagttaaaggtatttctgggtacgggttcgcatttatctgcggaagagacggtgtgagaatatgttccgagaccacacggagaacagatgacgtctccggatactccgtatcctattccacattttgtttgggaaacacatgccttgcatccatgatcgggagagcattcacagattctattgtgagtcgtgttacacgatcgcgtcgacattgttgacagaaacgtgaccttcattcttaccgtcgtccataaatacgttaggtatgtaccacatactgtcgcgaacgatgcgtccatctcataatgatttactttttcataattaaagatgtgaaagaaaaccgaacaatatatttttttagtaatgtttatgcgagacatataaaataaactccgtgtttatgatgccggtaaatgtttttatcatcttggacggaatcgattttgtaatatgccatggaaacaggacattatcactccatgataaattatttaatggagtcgatcctctcattgttctttgcgtatctcaatctgtggcgtttgcttcgtttaaataatatatcaaacatggagacgcctgatatgtaggcattcttcattctattaatgtctgctctatagcgctttagttccttatgacgaccggcgatatcatacttactttagaaggaaaatcatcatctaggattaaggcgtatctgatacaggcgaataatggttcaggatatagatagcgtatatctctattaaatgcgtcaatcatagtctctagagtgggatggtaactcagtaataaatcaactagcttctctttggtaactgcttttctggatggccgtattgattatcgagcgtgacactcgctccatattccaataaccgctttgcaaattgtatattattgacatcgaccgcgtaatatagtagagttatcgatcatatctatatcatccatgtacttgcttagtatatcaaatacatcttcataacagtgatacccgcaattattaaatctcgataatatcagaccgtacatacatagacggccattgttagatatgtgatttacagccgcgtgtccatattttccacgataaaccttacgacgtttacatcgacgagattattattaacaaagttgttgtccgtcgtcttatccaacatgcattgaatgataggtatacttaccatatcgccgtaatgtaagtagtttatcagtatggcttgtacgatggattcatcctgttgtctaaatctctttagaatgttatcgatgatgtagtggttatattctctggaatcgtacgaagtaatactacgcattacgtcgacaagagtatgacgtctctcaataagaagattaacgatttccatgtctacattatatggggttactctaaatcgcttgtttagataatacgcctctaatatagggctgacgtcgtatactctacacgtgtccacatcctttattaataatctctatatctatggttgagcaagaccagtagtattggatggaaacattgttatcgatcaaacatttaattacatccttggatagagattctctatgagacgatatatagtaatgaagagagttcttacacatatcactgttgtacatacaggtacgaaatacgtaaccggtgctgtaacattctgatttaagaagccatagcaatacttctggtctcggattaggcgtcgttacgtatatatccaccaatccgagaccattgattgcataattcgtattcttggacggacgtatccgtttatccacaattaggtattttagcagacgtaagtcgaaatcatttatattcgacttgagttcgttagaggaattcgaatagctggatatcagtagatgcacaatctgagattttacgtatctatgcttactgtatgctcctagcggagttaatccttcgttgtttctacaaagtctctcgactccgcgagagagtaacagtcgaacaatcttaatgtctgtatcgcatttattggagacgtaacaatgtagcgcattgtttcctcgtctatctatatgttttgataagttgtgacacgtttcaatttctagttttatttttttgtacgtcacatcttcatccagtagacgacatagaatacatgtgcaatccatagctattctggtgctaattattcctcataagatgataaaaagtgtagtgagagagcatgaaggagatttagtatttagcagtgcggatatgatccaagagggtgagatagtcgttctcgttcagaatctttcgcagcataagtagtatgtcgatatacttatcgttgaagactcttccagagacgatagctgattgagtacaaagtccaatgattgcacgaagttcttcggcggttttcatggagtcatttctgatgaaacatttaatgatctaaatttcagtttatgtttgtaccccgtattcatacttaacaaattggtattacataccattaataatgcaagcataaaaaatcgttagtagatgtttctaaatataggttccgtaagcaaagaatataagaatgaagcggtaatgataaaatcaatcgttatctaaaatgatcatactcatttattttattctattatattaacacatacatttttaacagcaacacattcaatattgtattgttatttttatattatttacacaattaacaatatattattagtttatattactgaattaataatataaaattcccaatcttgtcataaacacacactgagaaacagcataaacacaaaatccatcaaaaatgttgataaattatctgatgttgttgttcgctgctatgataatcagatcattcgccgatagtggtaacgctatcgaaacgacatcgccagaaattacaaacgctacaacagatattccagctatcagattatgcggtccagagggagatggatattgtttacacggtgactgtatccacgctagagatatcgacggtatgtattgtagatgctctcatggttatacaggcattagatgtcagcatgtagtattagtagactatcaacgttcagaaaaaccaaacactacaacgtcatatatcccatctcccggtattatgcttgtattagtaggcattattattattacgtgttgtctattatctgtttataggttcactcgacgaactaaactacctatacaagatatggttgtgccataatttttataaattttttttatgagtatttttacaaaaatgtataaagtgtatgtcttatgtatatttataaaaatgctaaatatgcgatgtatctatgttatttgtatttatctaaacaatacctctacctctagatattatacaaaaattttttatttcggcatattaaagtaaaatctagttaccttgaaaatgaatacagtgggtggttccgtatcaccagtaagaacataatagtcgaatacagtatccgattgagattttgcatacaatactagtctagaaagaaatttgtaatcatcttctgtgacgggagtccatatatctgtatcatcgtcccatgctatattcctgttatcatcattagttaatgaaaataactctcgtgcttcagaaaagtcaaatattgtatccatacatacatctccaaaactatcgcttatacgtttatctttaacgatacctatacctagatggttatttactaacagacattttccagatctattgactataactcctatagtttccacatcaaccaagtaatgatcatctattgttatataacaataacataactcttttccgtttttatcagtatgtatatctatatcaacgtcgtcgttgtagtgaatagtagtcattgatctattatatgaaacggatatgtctagaacggcaattgttttacgtccagttaacactttcgttgatttaaagtctagagtctttgcaaacataatatccttatccgactttatatttcctgtagggtggtataattttattttgcctccacatatcggtgtttccaaatatattactagacaatattccatatagttattagttaagggtacccaattagaacacgtacgcttattatcatcatttggatcgtatttcataaaagttattgtactatcgatgtcaacacattctacattttttaatcgtctatatagtatttttctgatattttctataatatcagaattgtcttccatcggaagttgtatactatcggaatcagttacatgtttaaataattctctgatgtcattccttatacaatcaaattcattattaaacagtttaatagtctgtagacctttatcgtcgtaaatatccattgtcttattagttacgcttatttttatgtgtttttacgttgctttattatattttataagaatgattgtttgacgaatcacgagaactattaagacacattattaggtatatattataaaaaagtttttgattacgatgttataagaggaaagaggacacattaacatcatacatcaattaactacattcttataacatcgtaatcaaaagaattgcaattttgatgtataacaactgtcaatgggttatggaattgtatattacatattatacggtatgttggtaacgacaaataccgatcggtaattgtctgccggtgtaatagaattatatatatctatctattacaccggccttgtatacataataataagttgtggtagtatgatctccatatttataatttaggactttgtattcagtttttttggaatcataaaaaataaaaaaaagttttactaatttaaaattatttacatttttttcactgtttagtcgcggatatggaattcgatcctgccaaaatcaatacatcatctatagatcatgtaacaatattacaatacatagatgaaccaaatgatataagactaacagtatgcattatcacaaaaataaatccacatttggctaatcaatttcgggcttggaaaaaacgtatcgccggaagggactatatgactaacttatctagagatacaggaatacaacaatcaaaacttactgaaactgtcaaaaaaatagaaacatatatggtctatatatacactacaatttagttattaattggataaccgatgtgattatcaatcaatattaagaaggttggtaaattggtacatagctaataatacctatacacccaataatacaacaaccatttctgagttggatatcatcaaaatactggataaatacgaggacgtgtatagagtaagtaaagaaaaagaatgtgaaatttgctatgaagttgtttactcaaaacgatagatactttggtttattggattcgtgtaatcatatattttgcataacatgcatcaatatatggcatagaacacgaagagaaaccggtgcgtcggataattgtcctatatgtcgtacccgttttagaaacataacaatgagcaagttaactaataaataaaaagtttaatttgttgacgacgtatgtcgttattttttctcgtataaaagattaatttgattctaatataatctttagtattggataaatatcaattcaaattaattccattagattatatcataaataaaaatagtagcacgcactacttcagccaaatattcttttttgaaacgccatctatcgtagtgaggacacaagtgaacctataatgagcaaatttattagtatcggttacatgaaggactttacgtagagtggtgattccactatctgtggtacgaacggtttcatcttctttgatgccatcacccagatgttctataaacttggtatcctttgccaaccaatacatatagctaaactcaggcatatgttccacacatcctgaacaatgaaattctccagaagatgttacaatgtctagatttggacatttggtttcaaccgcgttaacatatgagtgaacacacccatacatgaaagcgatgagaaataggattttcatcttgccaaaatatcactagaaaaaatttatttatcaattttaaaggtataaaaaatacttattgttgctcgaatattttgtatttgatggtatacggaagattagaaatgtaggtattatcatcaactgattctatggttttatgtattctatcatgtttcactattgcgttggaaataatatcatatgcttccacatatattttattttgttttaactcataatactcacgtaattctggattattgacatatctatgaataattttagctccatgatcagtaaatattaatgagaacatagtattaccacctaccattatttttttcatctcattcaattcttaattgcaaagatctatataatcattatagcgttgacttatggactctggaatcttagacgatgtacagtcatctataatcatggcatatttaatacattgttttatagcatagtcgttatctacgatgttagatatttctctcaatgaatcaatcacacaatctaatgtaggtttatgacataatagcattttcagcagttcaatgtttttagattcgttgatggcaatggctatacatgtatatccgttatttgatctaatgttgacatctgaaccggattctagcagtaaagatactagagattgtttattatatctaacagccttgtgaagaagtgtttctcctcgtttgtcaatcatgttaatgtctttaagataaggtaggcaaatgtttatagtactaagaattgggcaagcataagacatgtcacaaagaccctttttgtatgtataagtgtaaaaattataacattcatagttggatttacataggtgtccaatcgggatctctccatcatcgagataattgatggcatctcccttccttttttagtagatatttcatcgtgtaagaatcaatattaatatttctaaagtatccgtgtatagcctctttatttaccacagttccatattccactagagggatatcgccgaatgtcatatactcaattagtatatgttggaggacatccgagttcattgttttcaatatcaaaaagatggtttccttatcatttctccatagtggtacaatactacacattattccgtgcggctttccattttccaaaaacaatttgaccaaatctacatctttattgtatctataatcactatttagataatcagccataattactcgagtgcaacatgttagatcgtctatatatgaataagccgtgttatctattcctttcattaacaatttaacgatgtctatatctatatgagatgacttaatataatattgaagagctgtacaatagtttttatctataaaagacggcttgattccgtgattaattagacatttaacaacttccggacgcacatatgctctcgtatccgactctgaatacagatgagagatgatatacagatgcaatacggtaccgcaatttcgtagttgataatcatcatacgcgtatcagtactcgtcctcataaagaacactgcagccattttctatgaacaaatcaataatttcaggaacaggatcatctgtcattacataattttctataactgaacgatggttttcacatttaacactcaagtcaaatccatgttctaccaacacctttatcaagtcaacgtctacatttttggatttcatatagctgaatatattaaagtcatttatgttgctaaatccagtggcttctagtagagccatcgctatatcctttaactttaacatgtctactatttgtgtattcttctaatggggtagctgtctccaatttttgcgtaatggattagtgccactgtctagtagtagtttgacgacctcgacattattacaatgctcattaaaaaggtatgcgtgtaaagcattattcttgaattggttcctggtatcattaggatctctgtctctcaacatctgtttaagttcatcgagagccacctcctcattttccaaatagtcaaacattttgactgaatgagctactgtgaactctatacacccacacaactaatgtcattaaatatcatgtcaaaaacttgtacaattattaataaaaataatttagtgtttaaattttaccagttccagattttacacctccgttaaccccactttttacaccactggacgatcctcctccccacattccaccgccaccagatgtataagttttagatcctttattactaccatcatgtccatggataaagacactccacatgccgccactaccccctttagaagacatattaataagacttaaggacaagtttaacaataaaattaatcacgagtaccctactaccaacctacactattatatgattatagtttctatttttacagtaccttaactaaagtctctagtcacaagagcaatactaccaacctacactattatatgattatagtttctatttttataggaacgcgtacgagaaaatcaaatgtctaatttctaacggtagtgttgataaacgattatcgtcaatggatacctcctctatcatgtcgtctattttcttactttgttctattaacttattagcattatatattatttgattataaaacttatattgcttattagcccaatctgtaaatatcggattattaacatatcgtttctttgtaggtttatttaacatgtacatcactgtaagcatgtccgtaccatttattttaatttgacgcatatccgcaatttctttttcgcagtcggttataaattctatatatgatggatacatgctacatgtgtacttataatcgactaatatgaagtacttgatacatattttcagtaacgatttattattaccacctatgaataagtacctgtgatcgtctaggtaatcaactgttttcttaatacattcgatggttggtaatttactcagaataatttccaatatcttaatatataattctgctatttctgggatatatttatctgccagtataacacaaatagtaatacatgtaaacccatattttgttattatattaatgtctgcgccattatctattaaccattctactaggctgacactatgcgacttaatacaatgataaagtatactacatccatgtttatatcatcaatatacggcttacaaagttttagtatcgataacacatccaactcacgcatagagaaggtagggaataatggcataatatttattaggttatcatcattgtcattatctacaactaagtttccattttttaaaatatactcgacaactttaggatctctattgccaaatttttgaaaatatttatttatatgcttaaatctatataatgtagctccttcatcaatcatacatttaataacattgatgtatactgtatgataagatacatattctaacaatagatcttgtatagaatctgtatatcttttaagaattgtggatattattacgtaaactattacacaattctaaaatataaaacgtatcacggtcgaataatagttgatcaactatataattatcgattttgtgatttttcttcctaaactgtttacgtaaatagttagatagaatattcattagttcatgaccactatagttactatcgaataacgcgtcaaatatttcccgtttaatatcgcatttgtcaagataataatagagtgtggtatgttcacgataagtataataacgcatctctttttcgtgtgaaattaaatagtttattacgtccaaagatgtagcataaccatcttgtgacctagtaataatataataatagagaactgttttacccattctatcatcataatcagtggtgtagtcgtaatcgtaattgtctaattcatcatcccaattataatattcaccagcacgtctaatctgttctattttgatcttgtatccatactgtatgttgctacatgtaggtattcctttatccaataatagtttaaacacatctacattgggatttgatgttgtagcgtatttttctacaatattaataccatttttgatactatttatttctatacctttcgaaattagtaatttcaataagtctatatcgatgttatcagaacatagatattcgagtatatcaaaatcattgatatttttatagtcgactgacgacaataacaaaatcacaacatcgtttttgatattattatttttcttggtaacgtatgcctttaatggagtttcaccatcatactcatataatggatttgcaccactttctatcaatgattgtgcactgctggcatcgatgttaaatgttttacaactatcatagagtatcttatcgttaaccatgattggttgttgatgctatcgcattttttggtttctttcatttcagttatgtatggatttagcacgtttgggaagcatgagctcatatgatttcagtactgtagtgtcagtactattagtttcaataagatcaatctctagatctatagaatcaaaacacgataggtcagaagataatgaatatctgtaggcttcttgttgtactgtaacttctcgttttgttagatgtttgcatcgtgctttaacatcaatggtacaaattttatcctcgctttgtgtatcatattcgtccctactataaaattgtatattcagattatcatgagatgtgtatacgctaacggtatcaataaacggagcacaccatttagtcataaccgtaatccaaaaatttttaaagtatatcttaacgaaagaagttgtgtcattgtctacggtgtatggtactagatcctcataagtgtatatatctagagtaatgtttaatttatcaaatggttgataatatggatcctcatgacaatttccgaagatggaaatgagatatagacatgcaataaatctaattgcggacatggttactccttaaaaaaatacgaataatcaccttggctatttagtaagtgtcatttaacactatactcatattaatccatggactcataatctctatacgggattaacggatgttctatatacggggatgagtagttttcttctttaactttatactttttactaatcatatttagactgatgtatgggtaatagtgtttaaagagttcgttctcatcatcagaataaatcaatatctctgtttttttgttatacagatgtattacagcctcatatattacgtaatagaacgtgtcatctaccttattaactttcaccgcatagttgtttgcaaatacggttaatcctttgacctcgtcgatttccgaccaatctgggcgtataatgaatctaaactttaatttcttgtaatcattcgaaataatttttagtttgcatccgtagttatcccctttatgtaactgtaaatttctcaacgcgatatctccattaataatgatgtcgaattcgtgctgtatacccatactgaatggatgaacgaataccgacggcgttaatagtaatttactttttcatctttacatattgggtactagttttactatcataagtttataaattccacaagctactatggaataagccaaccatcttagtataacacacatgtcttaaagtttattaattaattacatgttgttttatatatcgctacgaatttaaacagagaaatcagtttaggaaaaaaaaatatctatctacatcatcacgtctctgtattctacgatagagtgctactttaagatgagacatatccgtgtcatcaaaaatatactccattaaaatgattattccggcagcgaacttgatattggatatatcacaacctttgttaatatctacgacaatagacagcagtcccatggttccataaacagtgagtttatctttctttgaagagatattttgtagagatcttataaaactgtcgaatgacatcgcatttatatctttagctaaatcgtatatgttaccatcgtaatatctaaccgcgtctatcttaaacgtttccatcgctttaaagacgtttccgatagatggtctcatttcatcagtcatactgagccaacaaatataatcgtgtataacatctttgatagaatcagactctaaagaaaacgaatcggctttattatacgcattcatgataaacttaatgaaaaatgtttttcgttgtttaagttggatgaatagtatgtcttaataattgttattatttcattaattaatatttagtaacgagtacactctataaaaacgagaatgacataactagttatcaaagtgtctaggacgcgtaattttcatatggtatagatcctgtaagcattgtctgtattctggagctattttctctatatctaatttctgaacgttcaccaatgtctctagccactttggcactaatagcgatcattcgcttagcgtcttctatattattaactggttgattcaatctatctagcaatggaccgtcggacagcgtcattctcatgttcttaatcaatgtacatacatcgccgtcatctaccaattcatccaacaacataagctttttaaaatcatcattataataggtttgatcgttgtcatttctccaaagaatatatctaataagtagagtcctcatgattagttaacaactattttttatgttaaatcaattagtacaccgctatgtttaatacttattcatattttagtttttaggattgagaatcaatacaaaaattaatgcatcattaattttagaaatacttagtttccacgtagtcaatgaaacatttgaactcatcgtacaggacgttctcgtacaggacgtaactataaaccggtttatatttgttcaagatagatacaaatccgataactttttttacgaattctacgggatccactttaaaagtgtcataccgggttctttttatttttttaaacagattaatggtgtgatgttgattaggtcttttacgaatttgatatagaatagcgtttacatattctccataatggtcaatcgccatttgttcgtatgtcataaattctttaattatatgacactgtgtattatttagttcatccttgttcatcattaggaatctatccaatatggcaattatactagaactataggtgcgttgtatacacatattgatgtgtctgtttatacaatccatgctactaccttcgggtaaaattgtagcatcatataccatttctagtactttaggttcattgttatccattgcagaggacgtcatgaacgcatcctaaaaaaatatattatttttatgttattttgttaaaaataatcatcgaatacgaactagtataaaaaggcgcgccttaggcctgagttgagtcagcactgctcatggattgttgcaattgtttggagaaatcatccaaatctgcagcaggaagaagagtcacagtttgctgtttcttctgtctctgcggtaaggcttgagtttcatcagccttcttcttcttgtccttcttaggctctgttggtgggaatgtcttgtatgcgtcaatatgcttattcagcaatatgacttgatctttgaaatttggatctttgtcatccaatttgatggcacctgtgtaggtcaaccacgttcccgaaggtgtgacttccatgccaatgcgcgacattccgaagaacgctgaagcgctgggagcaaattgtgcaatttgcggccaatgtttgtaatcagttccttgtctgattagttcctggtctccaaagtttccttgggtttgttctggaccacgtctgccgaaagcttgtgttacattgtatgctttagtggcagtacgtttctgccgaggcttcttagaagcctcagcagcagatttcttagtgacagtttggccttgttgttgttggcctttaccagacatcttgctctcaagctggttcaatctgtcaagcagcagcaaagcaagagcagcatcaccgccattgccagccattctagcaggagaagttcctctactgctgcctggagttgaatttcttgaactgttgcgactacgtgatgaggaacgagaagaggcttgactgccgcctctgctcccttctgcgtagaagcctttaggcaatgttgttccttgaggaagttgtagcacgattgcagcattgttagcaggattgcgggtgccaatgtgatctttaggtgtattcaaggctccctcagttgcaacccatatgatgccgtctttgttagcaccatagggaagtccagcttctggcccagttcctaggtagtagaaataccatcttggactgagatctttcatcttaccgtcaccaccacgaattcgtctggtagctcttcggtagtagccaatttggtcatctggactgctattggtgttaattggaacgccttgtcctcgagggaatttaaggtcttccttgccatgttgagtgagagcggtgaaccaagacgcagtattattgggtaaaccttgaggccgacgttgtttagatcgcgctccactgcgttctccattctggttactgccagttgaatctgagggtccaccaaacgtaatgcgtggtgcgtttcgctgattctgtggtccgttatcagacatggtggcggcgtttatcttatttatgattatttctcgctttcaatttaacacaaccctcaagaacctttgtatttattttcaatttttgaatcatccagtccactgaatagcaaaatctttactattttggtatcttccaatgtggctgcctgatgtaatggaaattcattctctagaagatttttcaatgctccagcgttcaacaacgtacatactagacgcacgttattatcagctattgcataatacaaggcactatgtccatggacatccgccttaaatgcatctttgctagagagaaagcttttcagctgcttagacttccaagtattaattcgtgacagatccatgtctgaaacgagacgctaattagtgtataatttttgtcatattgcaccagaattaataatatctctaatagatctgattagtagatacatggctatcgcaaaacaacatatacacatttaataaaaataatatttattaagaaaattcagatttcacgtacccatcaatataaataaaataatgattccttacaccgtacccatattaaggagattctaccttacccataaacaatataaatccagtaatatcatgtctgatgatgaacacaaatggtgtattaaattccagtttttcaggagatgatctcgccgtagctaccataatagtagatgcctctgctacagttccttgttcgtcgacatctatctttgcattctgaaacattttataaatatataatgggtccctagtcatatgtttaaacgacgcattatctggattaaacatactaggagccatcatttcggctatcgacttaatatccctcttattttcgatagaaaatttagggagtttaagattgtacactttattccctaattgaaacgaccaatagtctaattttgcagccgtaatagaatctgtgaaatgggtcatattatcacctattgccaggtacatactaatattagcatccttatacggaaggcgtaccatgtcatattctttgtcatcgattgtgattgtatttccttgcaatttagtaactacgttcatcatgggaaccgttttcgtaccgtacttattagtaaaactagcattgcgtgttttagtgatatcaaacggatattgccatatacctttaaaatatatagtattaatgattgcccatagagtattattgtcgagcatattagaatctactacattagacataccggatctacgttctactatagaattaattttattaaccgcatctcgtctaaagtttaatctatataggccgaatctatgatattgttgataatacgacggtttaatacacacagtattatctacgaaactttgataagttagatcagtgtacgtatatttagatgttttcagcttagctaatcctgatattaattctgtaaatgctggacccagatctctttttctcaaatccatagtcttcaataattctattctagtattacctgatgcaggcaatagcgacataaacatagaaaacgaataaccaaacggtgagaagacaatattatcatcttgaatatttttatacgctactataccggcattggtaaatccttgtagacgataggtagacgctgaacacgttaacgatagtatcaataacgcaatcatgattttatggtattaataattaaccttatttttatgttcggtataaaaattattgatgtctacacatccttttgtaattgacatctatatatccttttgtataatcaactctaatcactttaacttttacagttttccctaccagtttatccctatattcaacatatctatccatatgcatcttaacactctctgccaagatagcttcagagtgaggatagtcaaaaagataaatatatagagcataatcattctcgtatactctgccctttattacatcgcccgcattgggcaacgaataacaaaatgcaagcatcttgttaacgggctcgtaaattgggataaaaattatgtttttatatctattttattcaagagaatattcaggaatttctttttccggttgtatctcatcgcagtatatatcatttgtacattgtttcatattttttaatagtttacaccttttagtaggactagtatcgtacaattcatagctgtattttgaattccaatcacgcataaaaatatcttctaattgttgacgaagacctaatccatcatccggtgtaatattaatagatgctccacatgtatccgtaaagtaatttcctgtccaatttgaggtacctatataggccgttttatcggttaccatatatttggcatggtttaccctagaatacggaatgggaggatcagcatctggtacaataaatagctttacttctatatttatgtttttagattttagcatagcgatagatcttaaaaagtttctcatgataaacgaagatcgttgccagcaactaatcaatagcttaacggatacttgtctgtctatagcggatcttcttaattcatcttctatataaggccaaaacaaaattttacccgccttcgaataaataatagggataaagttcataacagatacataaacgaatttactcgcatttctaatacatgacaataaagcggttaaatcattggttctttccatagtacatagttgttgcggtgcagaagcaataaatacagagtgtggaacaccacttacgttaatactaagaggatgatctgtattataatacgacggataaaagtttttccaattatatggtagattgttaactccaagataccagtatacctcaaaaatttgagtgagatccgctgccaagttcctattattgaagatcgcaatacccaattctttgacctgagttagtgatctccaatccatgttagcgcttcctaaataaatatgtgtattatcagatatccaaaattttgtatgaagaactcctcctaggatatttgtaatatctatgtatcgtacttcaactccggccatttgtagtctttcaacatcctttaatggtttgttagatttattgacggctactctaactcgtactcctcttttgggtaattgtacaatctcgtttaatattatcgtgccgaaattcgtacccacttcatccgataaactccaataaaaagatgatatatctagtgtttttgtggtattggatagaatttccctccacatgttaaatgtagacaaatatactttatcaaattgcatacctataggaatagtctctgtaatcactgcgattgtattatccggattcattttatttgttaaaagaataatcctatatcacttcactctattaaaaatccaagtttctatttctttcatgactgattttttaacttcatccgtttccttatgaagatgatgtttggcaccttcataaatttttatttctctattacaatttgcatgttgcatgaaataatatgcacctaaaacatcgctaatctcattgtttgttccctggagtatgagagtcggggtgttaatcttggaaattatttttctaaccttgttggtagccttcaagacctgactagcaaatccagccttaattttttcatgattgattaatgggtcgtattggtatttataaactttatccatatctctagatactgattctggacatagctttccgactggcgcatttggtgtgatggttcccataagtttggcagctagcagattcagtcttgaaacagcatctgcattaactagaggagacattagaatcattgctgtaaacaagtttggattatcgtaagaggctagtatagaaattgttgctcccatggaatgacccaataagtagatttaatagttaccacgtgctgtaccaaagtcatcaatcatcattttttcaccattacttcttccatgtccaatatgatcatgtgagaatactaaaattcctaacgatgatatgttttcagctagttcgtcataacgtccagaatgtttaccagctccatgacttatgaatactaatgccttaggatatgtaatcattgtccagattgaacatacagtttgcactcatgattcacgttatataactatcaatattaacagttcgtttgatgatcatattatttttatgttttattgataattgtaaaaacatacaattaaatcaatatagaggaaggagacggctactgtcttttgtgagatagtcatggcgactaaattagattatgaggatgctgttttttactttgtggatgatgataaaatatgtagtcgcgactccatcatcgatctaatagatgaatatattacgtggagaaatcatgttatagtgtttaacaaagatattaccagttgtggaagactgtacaaggaattgatgaagttcgatgatgtcgctatacggtactatggtattgataaaattaatgagattgtcgaagctatgagcgaaggagaccactacatcaattttacaaaagtccatgatcaggaaagtttattcgctaccataggaatatgtgctaaaatcactgaacattggggatacaaaaagatttcagaatctagattccaatcattgggaaacattacagatctgatgaccgacgataatataaacatcttgatactttttctagaaaaaaaattgaattgatgatataggggtcttcataacgcataattattacgttagcattctatatccgtgttaaaaaaaattatcctatcatgtatttgagagttttatatgtagcaaacatgatagctgtgatgccaataagctttagatattcacgcgtgctagtgttagggatggtattatctggtggtgaaatgtccgttatataatctacaaaacaatcatcgcatatagtatgcgatagtagagtaaacatttttatagtttttactggattcatacatcgtctacccaattcggttatgaatgaaattgtcgccaatcttacacccaaccccttgttatccattagtatagtattaacttcgttatttatgtcataaactgtaaatgattttgtagatgccatatcatacatgatattcatgtccctattataatcattactaactttatcacaatatatgttgataatatctatatatgatctagtctttgtgggcaactgtctatacaagtcgtctaaacgttgtttactcatatagtatcgaacagccatcattacatggtcccgttccgttgatagataatcgagtatgttagtggacttgtcaaatctatataccatattttctggaagtggatatacatagtcgtgatcaacattattgctagcctcatcttctatatcctgtactataccatctacataatctacgatattattacacataaacatcgacaacatactattgtttattatctaagtcctgttgatccaaacccttgatctcctctatttgtactatctagagattgtacttcttccagttctggataatatatacgttgatagattagctgagctattctatctccagtatttacattaaacgtacattttccattattaataagaatgactcctatgtttcccctataatcttcgtctattacaccacctcctatatcaatgccttttagtgacagaccagacctaggagctattctaccatagcaaatcttaggcatggacatactaatatctgtcttaattaactgtctttctcctggagggatagtataatcgtaagcgctatacaaatcatatccggcagcacccggcgattgcctagtaggagatttagctctgttagtttccttaacaaatctaactggtgagttaatattcatgttgaacataaaactaatattttatttcaaaattatttaccatcccatatattccatgaataagtgtgatgattgtacacttctatagtatctatatacgattcacgataaaatcctcctatcaatagcagtttattatccactatgatcaattctggattatccctcggataaataggatcatctatcagagtccatgtattgctggattcacaataaaattccgcatttctaccaaccaagaataaccttctaccgaacactaacgcgcatgatttataatgaggataataagtggatggtccaaactgccactgatcatgattgggtagcaaatattctgtagttgtatcagtttcagaatgtcctcccattacgtatataacattgtttatggatgccactgctggattacatctaggtttcagaagactcggcatattaacccaagcagcatccccgtggaaccaacgctcaacagatgtgggatttggtagacctcctactacgtataatttattgttagcgggtatcccgctagcatacagtctggggctattcatcggaggaattggaatccaattgtttgatatataatttacagctatagcattgttatgtatttcattgttcatccatccaccgatgagatatactacttctccaacatgagtacttgtacacatatggaatatatctataatttgatccatgttcataggatactctatgaatggatacttgtatgatttgcgtggttgtttatcacaatgaaatattttggtacagtctagtatccattttacattatttatacctctgggagaaagataatttgacctgattacatttttgataaggagtagcagatttcctaatttatttcttcgctttatataccacttaatgacaaaatcctcatctggaacatttagttcatcgctttctagaataagtttcatagatagataatcaaaattgtctatgatgtcatcttccagttccaaaaagtgtttggcaataaagtttttagtatgacataagagattggatagtccgtattctatacccatcatgtaacactcgacacaatattcctttctaaaatctcgtaggataaagtttatacaagtgtagatgataaattctacagaggttaatatagaagcacgtaataaattgacgacgttatgactatctatatatacctttccagtatatgagtaaataactatagaagttagactgtgaatgtcaaggtctagacaaaccctcgtaactggatctttatttttcgtgtatttttgacgtaaatgtgtgcgaaagtaaggagataactttttcaatatcgtagaattgactattatattgcctcctatggcatcaataattgttttgaatttcttagtcatagacaatgctaatatattcttacagtacacagtattgacaaatatcggcatttatgtttctttaaaagtcaacatctaaagaaaaatgattatcttcttgagacataactcccattttttggtattcacccacacgtttttcgaaaaaattagttttaccttctaatgatatattttccatgaaatcaaacggattggtaacattataaatttttttaaatcccaattcagaaatcaatctatccgcgacgaattctatatatgttttcatcatttcacaattcattcctataagtttaactggaagagccgcagtaagaaattcttgttcaatggataccgcatctgttataatagatctaacggtttcttcactcggtggatgcaataaatgtttaaacatcaaacatgcgaagtcgcagtgtagaccctcgtctctactaatcaattcgttggaaaacgtgagtccgggcattaggccacgctttttaagccaaaatatggaagcgaatgatccggaaaagaagattccttctactgcagcaaaggcaataagtctctctccataaccggcgctgtcatgtatccacttttgagcccaatcggccttcttttttacacaaggcatcgtttctatggcattaaagagatagtttttttcattactatctttaacataagtatcgatcaaaagactatacatttccgaatgaatgttttcaatggccatctgaaatccgtagaaacatctagcctcggtaatctgtacttctgtacaaaatcgttccgccaaattttcattcactattccgtcactggctgcaaaaaacgccaatacatgttttataaaatatttttcgtctggtgttagtttattccaatcattgatatctttagatatatctacttcttccactgtccaaaatgatgcctctgcctttttatacatgttccagatgtcatgatattggattgggaaaataacaaatctatttggatttggtgcaaggatgggttccataactaaattaacaataacaataaattttttttcagttatctatatgcctgtacttggatcttttgtacatcgatatcgccgcaatcactacaataattacaagtattattgatagcattgttattagtactatcataattaaattatcgttattatcattttgtaattgtgacatcatactagataaatcgtttgcgagattgttgtgggaagcgggcatggaggatgaattatcgttattattatttaaagcctcccattcggattcacaaatatggcgcgcgttcaacattttatggaaacagataacaagaaaactcgtcatcgttcaaatttttaacgatagtaaaccgattaaacgtcgagctaatttctaacgctagcgactctgttggatatgggtttccagatatatatcttttcagttcccctacgtatctataatcatctgtaggaaatggaagatatttccatttatctactgttcctaatatcatatgtggtggtgtagtagaaccattaagcgcgaaagatgttatttcgcatcgtattttaacttcgcaataatttctggttagataacgcactctaccagtcaagtcaatgatattagcctttacagatatattcatagtagtcgtaacgatgactccatcttttagatgcgatactcctttgtatgtaccagaatcttcgtacctcaaactcgatatatttaaacaagttaatgagatattaacgcgttttatgaatgatgatatataaccagaagttttatcctcggtggctagcgctataaccttatcattataataccaactagtgtgattaatatgtgacacgttagtgtgggtacaaatatgtacattatcgtctacgtcgtattcgatacatccgcatacagccaacaaatataaaatgacaaatactctaacgccgttcgtacccatcttgatgcggtttaataaatgttttgatttcaatttattgtaaaaaaagattcggttttatactgttcgatattctcattgcttatattttcatctatcatctccacacagtcaaatccgtggttagcatgcacctcatcaaccggtaaaagactatcggactcttctatcattataactctagaatatttaatttggtcattattaatcaagtcaattatcttatttttaacaaacgtgagtattttactcattttttataaaaacttttagaaatatacagactctatcgtgtgtctatatcttctttttatatccaatgtatttatgtctgatttttcttcatttatcatatataatggtccaaattctacacgtgcttcggattcatccagatcattaaggttcttataattgtaacatccttctcttccctcttctacatcttccttcttattcttattcttagcgtcacagaatctaccacagcaggatcccatgacgagcgtcatattaaactaatccattttcaattataatatacgattagtaatgaccattaaaataaaaatattcttcataaccggcaagaaagtgaaaagttcacattgaaactatgtcagtagtatacatcatgaaatgatgatatatatatactctattttggtggaggattatatgatataattcgtggataatcattcttaagacacatttcttcattcgtaaatcttttcacgttaaatgagtgtccatattttgcaatttcttcatatgatggcggtgtacgtggacgaggctgctcctgttcttgttgtagtcgccgactgtcgtgtctgcgtttagatccctccattatcgcgattgcgtagatggagtactattttataccttgtaattaaatttttttattaattaaacgtataaaaacgttccgtatctgtatttaagagccagatttcgtctaatagaacaaatagctacagtaaaaataactagaataattgctacacccactagaaaccacggatcgtaatacggcaatcggttttcgataataggtggaacgtatattttatttaaggacttaacaattgtctgtaaaccacaatttgcttccgcggatcctgtattaactatctgtaaaagcatatgttgaccgggcggagccgaacattctccgatatccaatttctgtatatctataatattattaacctccgcatacgcattacagttcttttctagcttggataccgcactaggtacatcgtctagatctattcctatttcctcagcgatagctcttctatccttttccggaagcaatgaaatcacttcaataaatgattcaaccatgagtgtgaaactaagtcgagaattactcatgcatttgttagttattcggagcgcgcaatttttaaactgtcctataacctctcctatatgaatagcacaagtgacattagtagggatagaatgttgagctaatttttgtaaataactatctataaaaagattatacaaagttttaaactctttagtttccgccatttatccagtctgagaaaatgtctctcataataaatttttccaagaaactaattgggtgaagaatggaaacctttaatctatatttatcacagtctgttttggtacacatgatgaattcttccaatgccgtactaaattcgatatctttttcgatttctggatatgtttttaataaagtatgaacaaagaaatggaaatcgtaataccagttatgtttaactttgaaattgttttttattttcttgttaatgattccagccacttgggaaaagtcaaagtcgtttaatgccgatttaatacgttcattaaaaacaaactttttatcctttagatgaattattattggttcattggaatcaaaaagtaagatattatcgggtttaagatctgcgtgtaaaaagttgtcgcagcatggtagttcgtaaattttaatgtataacagagccatctgtaaaaagataaactttatgtattgtaccaaagatttaaatcctaatttgatagctagctcggtatctactttatctgccgaatacagtgctaggggaaaaattataatatttcctctttcgtattcgtagttagttctcttttcatgttcgaaaaagtgaaacatgcggttaaaatagtttataacattaatattactgttaataactgccggataaaagtgggatagtaatttcacgaatttgatactgtcctttctctcgttaaacgcctttaaaaaaactttagaagaatatctcaatgatagttcctgaccatccatagtttgtatcaataatagcaacatatgaagaacacgtttatacagagtatgtaaaaatgttaatttatagtttaatcccatggcccacgcacacacgattaattttttttcatctccctttagattgttgtatagaaatttgggtactgtgaactccgccgtagtttccatgggactatataattttgtggcctcgaatacaaattttactacatagttatctatcttaaagactataccatatcctcctgtagatatgtgataaaaatcgtcgtttataggataaaatcgtttatccttttgttggaaaaaggatgaattaatgtaatcattctcttctatctttagtagtgtttccttattaaaattcttaaaataatttaacaatctaactgatggagcccaattttggtgtaaatctaattgggacattatattgttaaaatacaaacagtctcctaatataacagtatctgataatctatggggagacatccattgatattcaggggatgaatcattggcaacacccatttattgtacaaaaagccccaatttacaaacgaaagtccaggtttgatagagacaaactattaactattttgtctctgtttttaatttctttggtaatgaaattattcacaatatcagtatcttctttatctaccagagattttactaacttgataaccttggctgtctcattcaatagggtagtaatatttgtatgtgtgatattgatatcttttagaagtgattctttgatggtgccagcatacgaattacaataatgcagaaactcggttaacatgcaggaattatagtaagccaattccaattgttgcctgtgttgtattagagtgtcaatatgagcaatggtgtccttgcgtttctctgatagaatgcgagcagcgattttggcgttatcatttgacgatatttctggaatgacgaatcctgtttctactaactttttggtaggacaaagtgaaacaatcaagaagatagcttctcctcctatttgtggaagaaattgaactcctctagatgatctccttgacagatattggaccgaattacagaagtacctggaatgtaaagccctgaaaccccctcattttttaagcagattgttgccgtaaatcctgcactatgcccaagatagagagctcctttggtgaatccatctctatgtttcagtttaaccaagaaacagtcagctggtctaaaatttccatctctatctaatacagcatctaacttgatgtcaggaactatgaccggttatgttatatgtaacattgagtaaatccttaagttcataatcatcactgtcatcagttatgtacgatccaaacaatgtttctactggcatagtggatacgaagatgctatccatcagaatgtttccctgattagtattttctatatagctattcttctttaaacgattttccaaatcagtaactatgttcatttttttaggagtaggacgcctagccagtatggaagaggattttctagatcctctcttcaacatctttgatctcaatggaatgcaaaaccccatagtgtaacaaccaacgataaaaataatattgtttttcactttttataattttaccatctgactcatggattcattaatatctttataagagctactaacgtataattctttataactgaactgagatatatacaccggatctatggtttccataattgagtaaatgaatgctcggcaataactaatggcaaatgtataaaacaacgaaattatactagagttgttaaagttaatattttctatgagctgttccaataaattatttgttgtaactgcgttcaagtcataaatcatcttgatactatccagtaaaccgtttttaagttctggaatattattatcccattgtaaagcccctaattcgactatcgaatatcctgctctgatagcagtttcaatatcgacggacgtcaatactgtaataaaggtggtagtattgtcatcatcgtgataaactactggaatatggtcgttagtaggtacggtaactttacacaacgcgatatataactttccttttgtaccatttttaacgtagttgggacgtcctgcagggtattgttttgaagaaatgatatcgagaacagatttgatacgatatttgttggattcctgattatttactataatataatctagacagatagatgattcgataaatagagaaggtatatcgttggtaggataatacatccccattccagtattctcggatactctattaatgacactagttaagaacatgtcttctattctagaaaacgaaaacatcctacatggactcattaaaacttctaacgctcctgattgtgtctcgaatgcctcgtacaaggatttcaaggatgccatagattctttgaccaacgatttagaattgcgtttagcatctgatttttttattaaatcgaatggtcggctctctggtttgctaccccaatgataacaatagtcttgtaaagataaaccgcaagaaaatttatacgcatccatccaaataaccctagcaccatcggatgatattaatgtattattatagattttccatccacagttattgggccagtatactgttagcaacggtatatcgaatagattactcatgtaacctactagaatgatagttcgtgtactagtcataatatctttaatccaatctaagaaatttaaaattagattttttacactgttaaagttaacaaaggtattacccggatacgtggatatcatatatggtattggtccattatcagtaatagctccataaactgatacggcgatggtttttatatgtgtttgatctaacgaggaagaaattcgcgcccacaattcatctctagatatgtatttaatatcaaacggtaacacatcaatttcgggacgcgtatatgtttctaaatttttaatccaaatataatgatgacctatatgccctattatcatactgtcaactatagtacacctagagaacttacgatacatctgtttcctataatcgttaaattttacaaatctataacatgctaaaccttttgacgacaaccattcattaatttctgatatggaatctgtattctcaataccgtatcgttctaaagccagtgctatatctccctgttcgtgagaacgctttcgtataatatcgatcaacggataatctgaagtttttggagaataatatgactcatgatctatttcgtccataaacaatctagacataggaattggaggcgatgatcttaattttgtgcaatgagtcgtcaatcctataacttctaatattgtaatattcatcatcgacataacactatctatgttatcatcgtatattagtataccatgaccttcttcatttcgtgccaaaatgatatacagtcttaaatagttacgcaatatctcaatagtttcataattgttagctgttttcatcaaggtttgtatcctgtttaacatgatggcgttctatacgtttctattttttaaatttttaacgatttactgtggctagatacccaatctctctcaaatatttttttagcctcgcttacaagctgtttatctatactattaaaactgacgaatccgtgattttggtaatgggttccgtcgaaatttgccgaagtgatatgaacatattcgtcgtcgactatcaacaattttgtattattctgaatagtgaaaaccttcacagatagatcattttgaacacacaacgcgtctagacttctggcggttgccatagaatatacgtcgttcttatcccaattaccaactagaagtctgatcttaactcctctattaatggctgcttctataatggagttgtaaatgtcgggccaatagtagctattaccgtcgacacgtgtagtgggaactatggccaaatgttcaatatctatactagtcttagccgacttgagtttatcaataactacatcagtgtctagatctctagaatatcccaataggtgttccggagaatcagtaaagaacactccacctataggattcttaatatgatacgcagtgctaactggcagacaacaagccgcagagcataaattcaaccatgaattttttgcgctattaaaggctttaaaagtatcaaatcttctacgaagatctgtggccagcgggggataatcagaatatacacctaacgttttaatcgtatgtatagatcctccagtaaatgacgcgtttcctacataacatctttcattatctgacacccaaaaacaaccgagtagtagtcccacattattttttttatctatattaacggttataaaatttatatccgggcagtgactttgtagctctcccagatttcttttccctcgttcatctagcaaaactattattttaatccctttttcagatgcctcttttagtttatcaaaaataagcgctcccctagtcgtactcagaggattacaacaaaaagatgctatgtatatatatttcttagctagagtgataatttcgttaaaacattcaaatgttgttaaatgatcggatctaaaatccatattttctggtagtgtttctaccagcctacattttgctcccgcaggtaccggtgcaaatggccacatttagttaacataaaaacttatacatcctgttctatcaacgattctagaatatcatcggctatatcgctaaaattttcatcaaagtcgacatcacaacctaactcagtcaatatattaagaagttccatgatgtcatcttcgtctatttctatatccgtatccattgtagattgttgaccgattatcgagtttaaatcattactaatactcaatccttcagaatacaatctgtgtttcattgtaaatttataggcggtgtatttaagttggtagattttcaattatgtatcaatatagcaacagtagttcttgctcctccttgattctagcatcctcttcattattttcttctacgtacataaacatgtccaatacgttagacaacacaccgacgatggcggccgccacagacacgaatatgactaaaccgatgaccatttaaaaacccctctctagctttcacttaaactgtatcgattattcttttagaacatgtataatataaaaacattattctatttcgaatttaggcttccaaaaatttttcatccgtaaaccgataataatatatatagacttgttaatagtcggaataaatagattaatgcttaaactatcatcatctccacgattagagatacaatatttacattttttttgctgtttcgaaactttatcaatacacgttaatacaaacccaggaaggagatattgaaactgaggctgttgaaaatgaaacggtgaatacaataattcagataatgtaaaatcatgattccgtattctgatgatattagaactgctaatggatgtcgatggtatgtatctaggagtatctattttaacaaagcatcgatttgctaatatacaattatcattttgattaattgttattttattcatattcttaaaaggtttcatatttatcaattcttctacattaaaaatttccatttttaatttatgtagccccgcaatactcctcattacgtttcattttttgtctataatatccattttgttcatctcggtacatagattatccaattgagaagcgcatttagtagttttgtacattttaagtttattgacgaatcgtcgaaaactagttatagttaacattttattatttgataccctgatattaatacccctgccgttactattatttataactgatgtaatccacgtaacattggaattaactatcgatagtaatgcatcgacgcttccaaaattgtctattataaactcaccgataatttttttattacatgttttcatattcattaggattattaaatctttaatcttactacgattgtatgcgttgatattgcaagacgtcattctaaaagacggaggatctccatcaaatgccagacaatcacgtacaaagtacatggaaataggttttgttctattgcgcatcatagatttatatagaacacccgtagaaatactaatttgttttactctataaaatactaatgcatctatttcatcgttttgtataacgtctttccaagtgtcaaattccaaatttttttcattgatagtaccaaattcttctatctctttaactacttgcatagataggtaattacagtgatgcctacatgccgttttttgaaactgaatagatgcgtctagaagcgatgctacgctagtcacaatcaccactttcatatttagaatatatatatgtaaaaatatagtagaatttcattttgttttttttctatgctataaatgaattctcattttgcatctgctcatactccgttttatatcaataccaaagaaggaagatatctggttctaaaagccgttaaagtatgcgatgttagaactgtagaatgcgaaggaagtaaagcttcctgcgtactcaaagtagataaaccctcatcacccgcgtgtgagagaagaccttcgtccccttccagatgcgagagaatgaataacccaggaaaacaagttccgtttatgaggacggacatgctacaaaatatgttcgcggctaatcgcgataatgtagcttctagacttttgtcctaaaatacaattatatccttttcgatattaataaatccgtgtcgtccaggttttttatctctttcagtatgtgaatagataggtattttatctctattcatcatcgaatttaagagatccgataaacattgtttgtattctccagatgtcagcatctgatacaacaatatatgtgcacataaacctctggcacttatttcatgtaccttccccttatcactaaggagaatagtatttgagaaatatgtatacatgatattatcatgaattagatatacagaatttgtaacactctcgaaatcacacgatgtgtcggcgttaagatctaatatatcactcgataacacattttcatctagatacactagacattttttaaagctaaaatagtctttagtagtaacagtaactatgcgattattttcatcgatgatacatttcatcggcatattattacgcttaccatcaaagactataccatgtgtatatctaacgtattctagcatggttgccatacgcgcattaaacttttcaggatctttggatagatcttccaatctatctatttgagaaaacatttttatcatgttcaatagttgaaacgtcggatccactatatagatattatctataaagattttaggaactacgttcatggtatcctggcgaatattaaaactatcaatgatatgattatcgttttcatcttttatcaccatatagtttctaagatatgggattttacttaatataatattatttcccgtaataaattttattagaaatgccaaatctataagaaaagtcctcgaattagtttgaagaatatctatatcgccgtaccgtatatttggattaattagatatagagaatatgatccgtaacatatacaacttttattatggcgtctaagatattcttccatcaacttattaacatttttgactagggaagatacattatgacgtcccattacttttgccttgtctattactgcgacgttcatagaatttagcatatctcttgccaattcttccattgatgttacattataagaaattttagatgaaattacatttggagctttaatagtaagaactcctaatatgtccgtgtatgtggtcactaatacagattgtagttctataatcgtaaataatttacctatattatatgtttgagtctgtttagaaaagtagctaagtatacgatcttttatttctgatgcagatgtatcaacatcggaaaaaaatctttttttattcttttttactaaagatacaaatatgtctttgttaaaaacagttattttctgaatatttctagcttgtaattttaacatatgatattcgttcacactaggtactctgcctaaataggtttctataatctttaatgtaatattaggaaaagtattctgatcaggattcctattcattttgaggatttaaaactctgattattgtctaatatggtctcaacacaaactttttcacagagcgatagagtttttgataactcgtttttcttaagaaatataaaactactgtctccagagctcgctctatcttttattttatttaattcgatacaaactcctgatactggttcagaaagtaattcattaattttcagtcctttatagaagatatttaatatagataatacaaaatcttcagtttttgatatcgatctgattgatcctagaactagatatattaataacgtgctcattaggcagtttatggcagcttgataattagatatagtatattccagttcatatttattagataccgcattgcccagattttgatattctatgaattcctctgaaaataaatccaaaataactagacattctattttttgtggattagtgtactctcttccctctatcatgttcactactggtgtccacgatgataaatatctagagggaatataatatagtccataggatgccaatctagcaatgtcgaataactgtaattttattcttcgctcttcattatgaattgattcttgaggtataaacctaacacaaattatattattagacttttcgtatgtaatgtctttcatgttataagtttttaatcctggaatagaatctattttaatgaggcttttaaacgcagagttctccaacgagtcaaagcataatactctgttggttttcttatatacgatgttacgattttcttctttgaatggaataggtttttgaattagtttataattacaacataatagataaggaagtgtgcaaatagtacgcggaaaaaacataatagctcccctgttttcatccatggttttaagtaaatgatcactggcttctttagtcaatggatattcgaacattaaccgtttcatcatcattggacagaatccatatttcttaatgtaaagagtgatcaaatcattgtgtttattgtaccatcttgttgtaaatgtgtattcggttatcggatctgctcctttttctattaaagtatcgatgtcgatctcgtctaagaattcaactatatcgacatatttcatttgtatacacataaccattactaacgtagaatgtataggaagagatgtaacgggaacagggtttgttgattcgcaaactattctaatacataattcttctgttaatacgtcttgcacgtaatctattatagatgccaagatatctatataattattttgtaagatgatgttaactatgtgatctatataagtagtgtaataattcatgtatttcgatatatgttccaactctgtctttgtgatgtctagtttcgtaatatctatagcatcctcaaaaaatatattcgcatatattcccaagtcttcagttctatcttctaaaaaatcttcaacgtatggaatataataatctattttacctcttctgatatcattaatgatatagtttttgacactatcttctgtcaattgattcttattcactatatctaagaaacggatagcgtccctaggacgaactactgccattaatatctctattatagcttctggacataattcatctattataccagaattaatgggaactattccgtatctatctaacatagttttaagaaagtcagaatctaagacctgatgttcatatattggttcatacatgaaatgatctctattgatgatagtgactatttcattctctgaaaattggtaactcattctatatatgctttccttgttgatgaaggatagaatatactcaatagaatttgtaccaacaaactgttctcttatgaatcgtatatcatcatctgaaataatcatgtaaggcatacatttaacaattagagacttgtctcctgttatcaatatactattcttgtgataatttatgtgtgaggcaaatttgtccacgttctttaattttgttatagtagatatcaaatccaatggagctacagttcttggcttaaacagatatagtttttctggaacgaattctacaacattattataaaggactttgggtagataagtgggatgaaatcctattttaattaatgcgatagccttgtcctcgtgcagatatccaaacgcttttgtgatagtatggcattcattgtctagaaacgctctacgaatatctgtgacagatatcatctttagagaatatactagtcgcgttaatagtactacaatttgtattttttaatctatctcaataaaaaaattaatatgtatgattcaatgtataactaaactactaactgttattgataactagaatcagaatctaatgatgacgtaaccaagaagtttatctactgccaatttagctgcattatttttagcatctcgtttagattttccatctgccttatcgaatactcttccgtcgatatctacacaggcataaaatgtaggagagttactaggccccactgattcaatacgaaaagaccaatctctcttagttatttggcagtactcattaataatggtgacagggttagcatctttccaatcaataatttttttagccggaataacatcatcaaaagacttatgatcctctctcattgatttttcgcgggatacatcatctattatggcgtcagccataacatcagcatccggcttatccgcctccgttgtcataaaccaacgaggaggaatatcgtcggagctgtacaccatagcactacgttgaagatcgtacagagctttattaacttctcgcttctccatattaagttgtctagttagttgtgcagcagtagctccttcgattccaatgtttttaatagccgcacacacaatctctgcgtcagaacgctcgtcaatatagatcttagacatttttagagagaactaacacaaccagcaataaaactaatttattttatcatttttttattcatcatcctctggtggttcgtcgtttctatcgaatgtggatctgattaacccgtcatctataggtgatgctggttctggagattctggaggagatggattattatctggaagaatctctgttatttccttgttttcatgtatcgattgcgttgtaacattaagattgcgaaatgctctaaatttgggaggcttaaagtgttgtttgcaatctctacacgcatgtctaactagtggaggttcgtcagcggctctagtttgaatcatcatcggcgtagtattcctacttttacagttaggacacggtgtattgtatttctcgtcgagaacgttaaaataatcgttgtaactcacatcctttattttatctatattgtattctactcctttcttaatgcattttataccgaataagagatagcgaaggaattctttttcggtgccgctagtacccttaatcatatcacatagtgttttatattccaaatttgtggcaatagacggtttatttctatacgatagtttgtttctggaatcctttgagtattctataccaatattattctttgattcgaatttagtttcttcgatattagattttgtattacctatattcttgatgtagtactttgatgatttttccatggcccattctattaagtcttccaagttggcatcatccacatattgtgatagtaattctcggatatcagtagcggctaccgccattgatgtttgttcattggatgagtaactactaatgtatacattttccatttataacacttatgtattaactttgttcatttatattttttcattattatgttgatattaacaaaagtgaatatatatgttaataattgtattgtggttatacggctacaatttcataatgagtggaagtcagtgtccgatgatcaatgacgatagctttactctgaaaagaaagtatcaaatcgatagtgcggagtcaacaataaaaatggataagaagaggataaagtttcagaatagagccaaaatggtaaaagaaataaatcagacaataagagcagcacaaactcattacgagacattgaaactaggatacataaaatttaagagaatgattaggactactactctagaagatatagcaccatctattccaaataatcagaaaacttataaactattctcggacatttcagccatcggcaaagcatcacagaatccgagtaagatggtatatgctctgctgctttacatgtttcccaatttgtttggagatgatcatagattcattcgttatagaatgcatccaatgagtaaaatcaaacacaagatcttctctcctttcaaacttaatcttattagaatattagtggaagaaagattctataataatgaatgcagatctaataaatggagaataattggaacacaagttgataaaatgttgatagctgaatctgataaatatacaatagatgcaaggtataacctaaaacccatgtatagaatcaagggaaaatctgaagaagataccctctttatcaaacagatggtagaacaatgtgtgacatcccaggaattggtggaaaaagtgttgaagatactgtttagagatttgttcaagagtggagaatacaaagcgtacagatacgatgatgatgtagaaaatggatttattggattggatacactaaaattaaacattgttcatgatatagttgaaccatgtatgcctgttcgtaggccagtggctaagatactgtgtaaagaaatggtaaataaatactttgagaatccgctacatattattggtaaaaatcttcaagagtgcattgactttgttagtgaataggcatttcatctttctccaatactaattcaaattgttaaattaataatggatagtataaatagttattagtgataaaatagtaaaaataattattagaataagagtgtagtatcatagataactctcttctataaaaatggattttattcgtagaaagtatcttatatacacagtagaaaataatatagattttttaaaggatgatacattaagtaaagtaaacaattttaccctcaatcatgtactagctctcaagtatctagttagcaattttcctcaacacgttattactaaggatgtattagctaataccaatttttttgttttcatacatatggtacgatgttgtaaagtgtacgaagcggttttacgacacgcatttgatgcacccacgttgtacgttaaagcattgactaagaattatttatcgtttagtaacgcaatacaatcgtacaaggaaaccgtgcataaactaacacaagatgaaaaatttttagaggttgccgaatacatggacgaattaggagaacttataggcgtaaattatgacttagttcttaatccattatttcacggaggggaacccatcaaagatatggaaatcatttttttaaaactgtttaagaaaacagacttcaaagttgttaaaaaattaagtgttataagattacttatttgggcttacctaagcaagaaagatacaggcatagagtttgcggataatgatagacaagatatatacactctatttcaacaaactggtagaatagtccatagcaatctaacagaaacgtttagagattatatctttcccggagataagactagctattgggtgtggttaaacgaaagtatagctaatgatgcggatattgttcttaatagacacgccattaccatgtatgataaaattcttagttatatatactctgagataaaacaaggacgcgttaataaaaacatgcttaagttagtttatatctttgagcctgaaaaagatatcagagaacttctgctagaaatcatatatgatattcctggagatatcctatctattattgatgcaaaaaacgacgattggaaaaaatattttattagtttttataaagctaattttattaacggtaatacatttattagtgatagaacgtttaacgaggacttattcagagttgttgttcaaatagatcccgaatatttcgataatgaacgaattatgtctttattctctacgagtgctgcggacattaaacgatttgatgagttagatattaataacagttatatatctaatataatttatgaggtgaacgatatcacattagatacaatggatgatatgaagaagtgtcaaatctttaacgaggatacgtcgtattatgttaaggaatacaatacatacctgtttttgcacgagtcggatcccatggtcatagagaacggaatactaaagaaactgtcatctataaaatccaagagtagacggctgaacttgtttagcaaaaacattttaaaatattatttagacggacaattggctcgtctaggtcttgtgttagatgattataaaggagacttgttagttaaaatgataaaccatcttaagtctgtggaggatgtatccgcattcgttcgattttctacagataaaaaccctagtattcttccatcgctaatcaaaactattttagctagttataatatttccatcatcgtcttatttcaaaggtttttgagagataatctatatcatgtagaagaattcttggataaaagcatccatctaaccaagacggataagaaatatatacttcaattgataagacacggtagatcatagaacagaccaaatatattattaataatttgtatatacatagatataattatcacacatttttgataaatgggaactgctgcaacaattcagactcccaccaaattaatgaataaagaaaatgcagaaatgattttggaaaaaattgttgatcatatagttatgtatattagtgacgaatcaagtgattcagaaaataatcctgaatatattgattttcgtaacagatacgaagactatagatctctcattataaaaagtgatcacgagtttgtaaagctatgtaaaaatcatgcagagaaaagttctccagaaacgcaacaaatgattatcaaacacatatacgaacaatatcttattccagtatctgaagtactattaaaacctataatgtccatgggtgacataattacatataacggatgtaaagacaatgaatggatgctagaacaactctctaccctaaactttaacaatctccgcacatggaactcatgtagcataggcaatgtaacgcgtctgttttatacattttttagttatctgatgaaagataaactaaatatataagtataatcccattctaatactttaacctgatgtattacctgcatcttattagaatattaacctaactaaaagacataacatagttgataaaaagcggtaggatataaatattatggctgccaccgttccgcgttttgacgacgtgtacaaaaatgcacaaagaagaattctagatcaagaaacattttttagtagaggtctaagtagaccgttaatgaaaaacacatatctatttgataattacgcgtatggatggataccagaaactgcaatttggagtagtagatacgcaaacttagatgcaagtgactattatcccatttcgttgggattacttaaaaagttcgagtttctcatgtctctatataaaggtcctattcccgtatatgaagaaaaagtaaatactgaattcattgctaatggatcgttctctggtagatacgtatcatatcttcgaaagttttctgcccttccaacaaacgagtttattagttttttgttactgacttccattccaatctataatatcttgttctggtttaaaaatactcagtttgatattactaaacacacattattcagatacgtctatacagataatgccaaacacctggcgttggctaggtatatgcatcaaacaggagactataagcctttgtttagtcgtctcaaagagaattatatatttaccggtcccgttccaataagtatcaaagatatagatcaccctaatcttagtagagcaagaagtccatccgattatgagacattagctaatattagtactatattgtactttaccaagtatgatccggtattaatgtttttattgttttacgtacctgggtattcaattactacaaaaattactccagccgtagaatatctaatggataaactgaatctaacaaagagcgacgtacaactgttgtaaattattttatgcttcgtaaaatgtaggttttgaaccaaacattctttcaaagaatgagatgcataaaactttattatccaatagattgactatttcggacgtcaatcgtttaaagtaaacttcgtaaaatattctttgatcactgccgagtttaaaacttctatcgataattgtttcatatgttttaatatttacaagttttttggtccatggtacattagccggacaaatatatgcaaaataatatcgttctccaagttctatagtttctggattatttttattatattcagtaaccaaatacatattagggttatctgcggatttataatttgagtgatgcattcgactcaacataaataattctagaggagacgatctactatcaaattcggatcgtaaatctgtttctaaagaacggagaatatctatacatacctgattagaattcatccgtccttcagacaacatctcagacagtctggtcttgtatgtcttaatcatattcttatgaaacttggaaacatctcttctagtttcactagtacctttattaattctctcaggtacagattttgaattcgacgatgctgagtatttcatcgttgtatatttcttcttcgattgcataatcagattcttatataccgcctcaaactctattttaaaattattaaacaatactctattattaatcagtcgttctaactctttcgctatttctatagacttatcgacatcttgactgtctatctctgtaaacacggagtcggtatctccatacacgctacgaaaacgaaatctgtaatctataggcaacgatgttttcacaatcggattaatatctctatcgtccatataaaatggattacttaatggattggcaaaccgtaacataccgttagataactctgctccatttagtaccgattctagatacaagatcattctacgtcctatggatgtgcaactcttagccgaagcgtatgagtatagagcactatttctaaatcccatcagaccatatactgagttggctactatcttgtacgtatattgcatggaatcatagatggccttttcagttgaactggtagcctgttttagcatctttttatatctggctctctctgccaaaaatgttcttaatagtctaggaatggttccttctatcgatctatcgaaaattgctatttcagagatgaggttcggtagtctaggttcacaatgaaccgtaatatatctaggaggtggatatttctgaagcaagagctgattatttatttcttcttccaatctattggtactaacaacgacaccgactaatgtttccggagatagatttccaaagatacacacattaggatacagactgttataatcaaagattaatacattattactaaacattttttgttttggagcaaataccttaccgccttcataaggaaacttttgttttgtttctgatctaactaagatagttttagtttccaacaatagctttaacagtggacccttgatgactgtactcgctctatattcgaataccatggattgaggaagcacatatgttgacgcacccgcgtctgtttttgtttctactccataatactcccacaaatactgacacaaacaagcatcatgaatacagtatctagccatatctaaagctatgtttagattataatccttatacatctgagctaaatcaacgtcatcctttccgaaagataatttatatgtatcattaggtaaagtaggacatgatagtacgactttaaatccattttcccaaatatctttacgaattactttacatataatatcctcatcaacagtcacataattacctgtggttaaaacctttgcaaatgcagcggctttgcctttcgcgtccgtagtatcgtcaccgatgaacgtcatttctctaactcctctatttaatactttacccatgcaactgaacgcgttcttggatatagaatccaatttgtacgaatccaatttttcagatttttgaatgaatgaatatagatcgaaaaatatagttccattattgttattaacgtgaaacgtagtattggccatgccgcctactcccttatgactagactgatttctctcataaatacagagatgtacagcttcctttttgtccggagatctaaagataatcttctctcctgttaataactctagacgattagtaatatatctcagatcaaagttatgtccgttaaaggtaacgacgtagtcgaacgttagttccaacaattgtttagctattcgtaacaaaactatttcagaacatagaactagttctcgttcgtaatccatttccattagtgactgtatcctcaaacatcctctatcgacggcttcttgtatttcctgttccgttaacatctcttcattaatgagcgtaaacaataatcgtttaccacttaaatcgatataacagtaacttgtatgcgagattgggttaataaatacagaaggaaacttcttatcgaagtgacactctatatctagaaataagtacgatcttgggatatcgaatctaggtatttttttagcgaaacagttacgtggatcgtcacaatgataacatccattgttaatctttgtcaaatattgctcgtccaacgagtaacatccgtctggagatatcccgttagaaatataaaaccaactaatattgagaaattcatccatggtggcattttgtatgctgcgtttctttggctcttctatcaaccacatatctgcgacggagcattttctatctttaatatctagattataacttattgtctcgtcaatgtctatagttctcatctttcccaacggcctcgcattaaatggaggaggagacaatgactgatatatttcgtccgtaactacgtaataaaagtaatgaggaaatcgtataaatacggtctcgccatttcgacatctggatttcagatataaaaatctgttttcaccgtgactttcaaaccaattaatgcaccgaacatccatttatagaatttagaaatatattttcatttaaatgaatcccaaacattggggaagagccgtatggaccattatttttatagtactttcgcaagcgggtttagacggcaacatagaagcgtgtaaacgaaaactatatactatagtcagcactcttccatgtcctgcatgtagacggcacgcgactatcgctatagaggacaataatgtcatgtctagcgatgatctgaattatatttattattttttcatcagattatttaacaatttggcatctgatcccaaatacgcgatcgatgtgacaaaggttaaccctttataaacttaacccattataaaacttatgattagtcacgactgaaataaccgcgtgattattttttggtataattctacacggcatggtttctgtaactatgaattcaacccccgttacattagtgaaatctttaacaaacagcaagggttcgtcaaagacataaaactcattgtttacaatcgaaatagaccccctatcacacttaaaataaaaaatatccttatcctttaccaccaaataaaattctgattggtcaatgtgaatgtattcacttaacagttccacaaatttatttattaactccgaggcacatacatcgtcggtattttttatggcaaactttactcttccagcatccgtttctaaaaaaatattaacgagttccatttatatcatccaatattattgaaatgacgttgatggacagatgatacaaataagaaggtacggtacctttgtccaccatctcctccaattcatgctctattttgtcattaactttaatgtatgaaaacagtacgccacatgcttccatgacagtgtgtaacactttggatacaaaatgtttgacattagtataattgtccaagactgtcaatctataatagatagtagctataatatattctatgatggtattgaagaagatgacaatcttggcatattgatcatttaacacagacatggtatcaacagatagcttgaatgaaagagaatcagtaattggaataagcgtcttctcgatagagtgtccgtataccaacatgtctgatattttgatgtattccattaaattatttagttttttctttttattctcgttaaacagcatttctgtcaacggaccccaacatcgttgaccgattaagttttgattgatttttccgtgtaaggcgtatctagtcagatcgtatagcctatccaataatccatcatctgtgcgtagatcacatcgtacactttttaattctctatagaagagcgacagacagcaatttctttattctctacagatgtaagatacttgaagacattcctatgatgatgcagaattttggataacacggtattgatggtatctgttaccataattcctttgatggctgatagtgtcagagcacaagatttccaatctttgttttgatatctatatcagacagcatggtgcgtctgacaacacaaggattaagacggaaagatgaaatgattctctcaacatcttcaatggataccttgctattttttctggcattatctatatgtgcgagaatatcctctagagaatcagtatcctttttgatgatagtggatctcaatgacatgggacgtctaaaccttcttattctatcaccagattgcatggtgatttgtcttctttcttttatcataatgtaatctctaaattcatcggcaaattgtctatatctaaaatcataatatgagatgtttacctctacaaatatctgttcgtccaatgttagagtatctacatcagttttgtattccaaattaaacatggcaacggatttaattttatattcctctattaagtcctcgtcgataataacagaatgtagataatcatttaatccatcgtacatggttggaagatgcttgttgacaaaatctttaattgtcttgatgaaggtgggactatatctaacatcttgattaataaaatttataacattgtccataggatactttgtaactagttttatacacatctcttcatcggtaagtttagacagaatatcgtgaacaggtggtatattatattcatcagatatacgaagaacaatgtccaaatctatattgtttaatatattatatagatgtagcgtagctcctacaggaatatctttaactaagtcaatgatttcatcaaccgttagatctattttaaagttaatcatataggcattgatttttaaaaggtatgtagccttgactacattctcattaattaaccattccaagtcactgtgtgtaagaagattatattctatcataagcttgactacatttggtcccgataccattaaagaattcttatgatataaggaaacagattttaggtactcatctactctacaagaattttggagagccttaacgatatcagtgacgtttattatttcaggaggaaagaatctaacattgagaatatcggaattaatagcttccagatacagtgattttggcaatagtccgtgtaatccataatccagtaacacgagctggtgcttgctagacaccttttcaatgtttaatttttttgaaataagctttgataaagccttcctcgcaaattccggatacatgaacatgtcggcgacatgattaagtattgttttttcattattttctcaacaagttctcaataccccaatagatgatagaatatcacccaatgcgtccatgttgtctatttccaacaggtcgctatatccaccaatagaagtttttccaaaaaagattctaggaacagttctaccaccagtaatttgttcaaaatagtcacgcaattcattttcgggtttaaattctttaatatcgacaatttcatacgctcctcttttgaaactaaacttatttagaatatccagtgcatttctacaaaaaggacatgtatacttgacaaaaattgtcactttgttattggccaacctttgttgtacaaattcctcggccattttaatatttaagtgatataaaactatctcgacttatttaactctttagtcgagatatatggacgcagatagctatatgatagccaactacagaaggcaaacgctataaaaaacataattacgacgagcatatttataaatatttttattcagcattacttgatatagtaatattaggcacagtcaaacattcaaccactctcgatacattaactctctcattttctttaacaaattctacaatatcttcgtaaaaagattcttgaaactttttagaatatctatcgactctagatgaaatagcgttcgtcaacatactatgttttgtatacataaaggcgcccattttaacagtttctagtgacaaaatgctagcgatcctaggatcctttagaatcacatagattgacgattcgtctctcttagtaactctagtaaaataatcatacaatctagtacgcgaaataatattatccttgacttgaggagatctaaacaatctagttttgagaacatcgataagttcatcgggaatgacatacatactatctttaatagaactcttttcatccagttgaatggattcgtccttaaccaactgattaatgagatcttctattttatcattttccagatgatatgtatgtccattaaagttaaattgtgtagcgcttctttttagtctagcagccaatactttaacatcactaatatcgatatacaaaggagatgatttatctatggtattaagaattcgtttttcgacatctgtcaaaaccaattcctttttgcctgtatcatccagttttccatcctttgtaaagaaattattttctactagactattaataagactgataaggattcctccataattgcacaatccaaactttttaacaaaactagactttacaagatctacaggaatgcgtaattcaggtttcttagcttgtgattttttcttttgtggacattttcttgtgaccaactcatctaccatttcattgattttagcagtgaaataagctttcaatgcacgggcactgatactattgaaaacgagttgatcttcaaattccgccatttaagttcaccaaacaacttttaaatacaaatatatcaatagtagtagaataagaactataaaaaaaataataattaaccaataccaaccccaacaaccggtattattagttgatgtgactgttttctcatcacttagaacagatttaacaatttctataaagtctgtcaaatcatcttccggagaccccataaatacaccaaatatagcggcgtacaacttatccatttatacattgaatattggcttttctttatcgctatcttcatcatattcatcatcaatatcaacaagtcccagattacgagccagatcttcttctacattttcagtcattgatacacgttcactatctccagagagtccgataacgttagccaccacttctctatcaatgattagtttcttgagtgcgaatgtaatttttgtttccgttccggatctatagaagacgataggtgtgataattgccttggccaattgtctttctcttttactgagtgattctagttcaccttctatagatctgagaatggatgattctccagtcgaaacatattctaccatggatccgtttaatttgttgatgaagatggattcatccttaaatgttttctctgtaatagtttccaccgaaagactatgcaaagaatttggaatgcgttccttgtgcttaatgtttccatagacggcttctagaagttgatacaacataggactagccgcggtaacttttatttttagaaagtatccatcgcttctatcttgtttagatttatttttataaagtttagtctctccttccaacataataaaagtggaagtcatttgactagataaactatcagtaagttttatagagatagacgaacaattagcgtattgagaagcatttagtgtaacgtattcgatacattttgcattagatttactaatcgattttgcatactctataacacccgcacaagtctgtagagaatcgctagatgcagtaggtcttggtgaagtttcaactctcttcttgattaccttactcatgattaaacctaaataattgtactttgtaatataatgatatatattttcactttatctcatttgagaataaaaatgtttttgtttaaccactgcatgatgtacagatttcggaatcgcaaaccaccagtggttttattttatccttgtccaatgtgaattgaatgggagcggatgcgggtttcgtacgtagatagtacattcccgtttttagaccgagactccatccgtaaaaatgcatactcgttagtttggaataactcggatctgctatatggatattcatagattgactttgatcgatgaaggctcccctgtctgcagccatttttatgatcgtcttttgtggaatttcccaaatagttttataaactcgcttaatatcttctggaaggtttgtattctgaatggatccaccatctgccataatcctattcttgatctcatcattccataattttctctcggttaaaactctaaggagatgcggattaactacttgaaattctccagacaatactctccgagtgtaaatattactggtatacggttccaccgactcattatttcccaaaatttgagcagttgatgcagtcggcataggtgccaccaataaactatttctaagaccgtatgttctgattttatcttttagaggttcccaattccaaagatccgacggtacaacattccaaagatcatattgtagaataccgttactggcgtacgatcctacatatgtatcgtatggtccttccttctcagctagttcacaactcgcctctaatgcaccgtaataaatggtttcgaagatcttcttatttagatcttgtgcttccaggctatcaaatggataatttaagagaataaacgcgtccgctaatccttgaacaccaataccgataggtctatgtctcttattagagatttcagcttctggaataggataataattaatatctataattttattgagatttctgacaattactttgaccacatccttcagtttgagaaaatcaaatcgcccatctattacaaacatgttcaaggcaacagatgccagattacaaacggctacctcattagcatccgcatattgtattatctcagtgcaaagattactacacttgatagttcctaaattttgttgattactctttttgttacacgcatccttataaagaatgaatggagtaccagtttcaatctgagattctataatcgctttccagacgactcgagcctttattatagatttgtatctcctttctctttcgtatagtgtatacaatcgttcgaactcgtctccccaaacattgtccaatccaggacattcatccggacacatcaacgaccactctccgtcatccttcactcgtttcataaagagatcaggaatccaaagagctataaatagatctctggttctatgttcctcgtttcctgtattctttttaagatcgaggaacgccataatatcagaatgccacggttccaagtatatggccataactccaggccgtttgtttcctccctgatctatgtatctagcggtgttattataaactctcaacattggaataataccgtttgatataccattggtaccggagatatagcttccactggcacgaatattactaattgatagacctattccccctgccattttagagattaatgcgcatcgttttaacgtgtcatagataccctctatgctatcatcgatcatgttaagtagaaaacagctagacatttggtgacgactagttcccgcattaaataaggtaggagaagcgtgcgtaaaccatttttcagaaagtagattgtacgtctcaatagctgagtctatatcccattgatgaattcctactgcgacacgcattaacatgtgctgaggtctttcaacgatcttgttgtttattttcaacaagtaggatttttccaaagttttaaaaccaaaatagttgtatgaaaagtctcgttcgtaaataataaccgagttgagtttatccttatatttgttaactatatccatggtgatacttgaaataatcggagaatgtttcccatttttaggattaacatagttgaataaatcctccatcacttcactaaatagtttttttgtttccttgtgtagatttgatacggctattctggcggctagaatggcataatccggatgttgtgtagtacaagtggctgctatttcggctgccagagtgtccaattctaccgttgttactccattatatattccttgaataaccttcatagctattttaataggatctatatgatccgtgtttaagccataacataattttctaatacgagacgtgattttatcaaacatgacattttccttgtatccatttcgtttaatgacaaacatttttgttggtgtaataaaaaaaattatttaacttttcattaatagggatttgacgtatgtagcgtacaaaattatcgttcctggtatatagataaagagtcctatatatttgaaaatcgttacggctcgattaaactttaatgattgcatagtgaatatatcattaggatttaactccttgactatcatggcggcgccagaaattaccatcaaaagcattaatacagttatgccgatcgcagttagaacggttatagcatccaccatttatatctaaaaattagatcaaagaatatgtgacaaagtcctagttgtatactgagaattgacgaaacaatgtttcttacatattttttttttattagtaaccgacttaatagtaggaactggaaaactagacttgattattctataagtatagatacccttccaaataatattctctttgataaaagttccagaaaatgtagaattttttaaaaagttatcttttgctattaccaagattgtgtttagacgcttattattaatatgagtgatgaaatccacaccgcctctagatatcgcttttatttccacattagatggtaaatccaatagtgaaactatctttttaggaatgtatggactcgcgtttagaggagtgaacgtcttaggcgtcggaaaggatgattcatcaaacgaataaacaatttcacaaatggatgttaatgtattagtaggaaattttttgacgctagtggaattgaagattctaatggatgatgttctacctatttcatccgataacatgttaatttccgacaccaacggttttaatatttcgatgatatacggtagtctctctttcggacttatatagcttattccacaatacgagtcattatatactccaaaaaacaaaataactagtataaaatctgtatcgaatgggaaaaacgaaattatcgacataggtatagaatctggaacattgaacgtattaatacttaattctttttctgtggtaagtaccgataggttattgacattgtatggttttaaatattctataacttgagacttgatagatattagtgatgaattgaaaattatttttatcaccacgtgtgtttcaggatcatcgtcgacgcccgtcaaccaaccgaatggagtaaaataaatatcattaatatatgctctagatattagtatttttatcaatcctttgattatcatcttctcgtaggcgaatgattccatgatcaagagtgatttaagaacatcctccggagtattaatgggcttagtaaacagtccatcgttgcaataataaaagttatccaagttaaaggatattatgcattcgtttaaagatatcacctcatctgacggagacaattttttggtaggttttagagactttgaagctacttgtttaacaaagttattcatcgtcgtttactattctatttaattttgtagttaatttatcacatatcacattaattgactttttggtccatttttccatacgtttatattcttttaatcctgcgttatccgtttccgttatatccagggatagatcttgcaagttaaatagaatgctcttaaataatgtcattttcttatccgctaaaaatttaaagaatgtataaacctttttcagagatttgaaactcttaggtggtgtcctagtacacaatatcataaacaaactaataaacattccacattcagattccaacagctgattaacttctacattaatacagcctattttcgctccaaatgtacattcgaaaaatctgaataaaacatcgatgtcacaatttgtattatccaatacagaatgtttgtgattcgtgttaaaaccatcggagaaggaataaaaataaaaattattatagtggtggaattcagttggaatattgcctccggagtcataaaaggatactaaacattgttttttatcataaattacacatttccaatgagacaaataacaaaatccaaacattacaaatctagaggtagaacttttaattttgtctttaagtatatacgataagatatgtttattcataaacgcgtcaaatttttcatgaatcgctaaggagtttaagaatctcatgtcaaattgtcctatataatccacttcggatccataagcaaactgagagactaagttcttaatacttcgattgctcatccaggctcctctctcaggctctattttcatcttgacgacctttggattttcaccagtatgtattcctttacgtgataaatcatcgattttcaaatccatttgtgagaagtctatcgccttagatactttttcccgtagtcgaggtttaaagaaatacgctaacggtatactagtaggtaactcaaagacatcatatatagaatggtaacgcgtctttaactcgtcggttaactctttcttttgatcgagttcgtcgctactattgggtctgctcaggtgccccgactctactagttccaacatcataccgataggaatacaagacactttgccggcggttgtagatttatcatatttctccactacatatccgttacaatttgttaaaaatttagatacatctatattgctacataatccagctagtgaatatatatgacataataaattggtaaatcctagttctggtattttactaattactaaatctgtatatctttccatttatcatggaaaagaatttaccagatatcttcttttttccaaactgcgttaatgtattctcttacaaatattcacaagatgaattcagtaatatgagtaaaacggaacgtgatagtttctcattggcggtgtttccagttataaaacatagatggcataacgcacacgttgtaaaacataaaggaatatacaaagttagtacagaagcacgtggaaaaaaagtatctcctccatcactaggaaaacccgcacacataaacctaaccgcgaagcaatatatatacagtgaacacacaataagctttgaatgttatagttttctaaaatgtataacaaatacagaaatcaattcgttcgatgagtatatattaagaggactattagaagctggtaatagtttacagatattttccaattccgtaggtaaacgaacagatactataggtgtactagggaataagtatccatttagcaaaattccattggcctcattaactcctaaagcacaacgagagatattttcagcgtggatttctcatagacctgtagttttaactggaggaactggagtgggtaagacgtcacaggtacccaagttattgctttggtttaattatttatttggtggattctctactctagataaaatcactgactttcacgaaagaccagtcattctatctcttcctaggatagctttagttagattgcatagcaataccattttaaaatcattgggatttaaggtactagatggatctcctatttctttacggtacggatctataccggaagaattaataaacaaacaaccaaaaaaatatggaattgtattttctacccataagttatctctaacaaaactatttagttatggcactcttattatagacgaagttcatgagcatgatcaaataggagatattattatagcagtagcgagaaagcatcatacgaaaatagattctatgtttttaatgactgccacgttagaggatgacagggaacggctaaaagtatttttacctaatcccgcatttatacatattcctggagatacactgtttaaaattagcgaggtatttattcataataagataaatccatcttccagaatggcatacatagaagaagaaaagagaaatttagttactgctatacagatgtatactcctcctgatggatcatccggtatagtctttgtggcatccgttgcacagtgtcacgaatataaatcatatttagaaaaaagattaccgtatgatatgtatattattcatggtaaggtcttagatatagacgaaatattagaaaaagtgtattcatcacctaatgtatcgataattatttctactccttatttggaatccagcgttactatacgcaatgttacacacatttatgatatgggtagagtttttgtccccgctccttttggaggatcgcaagaatttatttctaaatctatgagagatcaacgaaaaggaagagtaggaagagttaatcctgggacatacgtatatttctatgatctgtcttatatgaagtctatacagcgaatagattcagaatttctacataattatatattgtacgctaataagtttaatctaacactccccgaagatttgtttataatccctacaaatttggatattctatggcgtacaaaggaatatatagactcgttcgatattagtacagaaacatggaataaattattatccaattattatatgaagatgatagagtatgctaaactttatgtactaagtcctattctcgctgaggagttggataattttgagaggacgggagaattaactagtattgtacaagaagccattttatctctaaatttacgaattaagattttaaattttaaacataaagatgatgatacgtatatacacttttgtaaaatattattcggtgtctataacggaacaaacgctactatatattatcatagacctctaacgggatatatgaatatgatttcagatactatatttgttcctgtagataataactaaaaatcaaactctaatgaccacatctttttttagagatgaaaaattttccacatctccttttgtagacacgactaaacattttgcagaaaaaagtttattagtgtttagataatcgtatacttcatcagtgtagatagtaaatgtgaacagataaaaggtattcttgctcaatagattggtaaattccatagaatatattaatcctttcttcttgagatcccacatcatttcaaccagagacgttttatccaatgatttacctcgtactataccacatacaaaactagattttgcagtgacgtcgtatctggtattcctaccaaacaaaattttacttttagttcttttagaaaattctaaggtagaatctctatttgccaatatgtcatctatggaattaccactagcaaaaaatgatagaaatatatattgatacatcgcagctggttttgatctactatactttaaaaacgaatcagattccataattgcctgtatatcatcagctgaaaaactatgttttacacgtattccttcggcatttctttttaatgatatatcttgtttagacaatgataaagttatcatgtccatgagagacgcgtctccgtatcgtataaatatttcattagatgttagacgcttcattaggggtatacttctataaggtttcttaatcagtccatcattggttgcgtcaagaactactatcggatgttgttgggtatctctagtgttacacatggccttactaaagtttgggtaaataactatgatatctctattaattatagatgcatatatttcatttgtcaaggatattagtatcgacttgctatcgtcattaatacgtgtaatgtaatcatataaatcatgcgatagccaaggaaaatttaaatagatgttcatcatataatcgtcgctataattcatattaatacgttgacattgactaatttgtaatatagcctcgccacgaagaaagctctcgtattcagtttcatcgataaaggataccgttaaatataactggttgccgatagtctcatagtctattaagtggtaagtttcgtacaaatacagaatccctaaaatattatctaatgttggattaatctttaccataactgtataaaatggagacggagtcataactattttaccgtttgtacttactggaatagacgaaggaataatctccggacatgctggtaaagacccaaatgtctgtttgaagaaatccaatgttccaggtcctaatctcttaacaaaaattacgatattcgatcccgatatcctttgcattctatttaccagcatatcacgaactatattaagattatctatcatgtctattctcccaccgttatataaatcgcctccgctaagaaacgttagtatatccatacaatggaatacttcatttctaaaatagtattcgttttctaattctttaatgtgaaatcgtatactagaaagggaaaaattatctttgagttttccgttagaaaagaaccacgaaactaatgttctgattgcgtccgattccgttgctgaattaatggatttacaccaaaaactcatataacttctagatgtagaagcattcgctaaaaaattagtagaatcaaaggatataagtagatgttccaacaagtgagcaattcccaagatttcatctatatcattctcgaatccgaaattagaaattcccaagtagatatcctttttcatccgatcgttgatgaaaatacgaactttattcggtaagacaatcatttactaaggagtaaaataggaagtaatgttcgtatgtcgttatcatcgtataaattaaaggtgtgttttttaccattaagtgacattataattttaccaatattggaattataatataggtgtatttgcgcactcgcgacggttgatgcatcggtaaatatagctgtatctaatgttctagtcggtatttcatcatttcgctgtctaataatagcgttttctctatctgtttccattacagctgcctgaagtttattggtcggataatatgtaaaataataagaaatacatacgaataacaaaaataaaataagatataataaagatgccatttagagatctaattttgtttaacttgtccaaattcctacttacagaagatgaggaatcgttggagatagtgtcttccttatgtagaggatttgaaatatcttatgatgacttgataacttactttccagataggaaataccataaatatatttctaaagtatttgaacatgtagatttatcggaggaattaagtatggaattccatgatacaactctgagagatttagtctatcttagattgtacaagtattccaagtgtatacggccgtgttataaattaggagataatctaaaaggcatagttgttataaaggacaggaatatttatattagagaagcaaatgatgacttgatagaatatctcctcaaggaatacactcctcagatttatacatattctaatgagcgcgtccccataactggttcaaaattaattctttgtggattttctcaagttacatttatggcgtatacaacgtcgcatataacaacaaataaaaaggtagatgttctcgtttccaaaaaatgtatagatgaactagtcgatccaataaattatcaaatacttcaaaatttatttgataaaggaagcggaacaataaacaaaatactcaggaagatattttattcggtaaccggtggccaaactccataatttgctttttctatttcggattttagaatttccaaattcaccagcgatttatcggttttggtgaaatccaaggatttattaatgtccacaaatgccatttgttttgtctgtggattgtatttgaaaatggaaacgatgtagttagatagatgcgctgcaaagtttcctattagggttccgcgctttacgtcacccagcatacttgaatcaccatcctttaaaaaaaatgataagatatcaacatggagtatatcatactcggattttaattcttctactgcatcactgacattttcacaaatactacaatacggtttaccgaaaataatcagtacgttcttcatttatgggtatcaaaaacttaaaatcgttactgctggaaaataaatcactgacgatattagatgataatttatacaaagtatacaatggaatatttgtggatacaatgagtatttatatagccgtcgccaattgtgtcagaaacttagaagagttaactacggtattcataaaatacgtaaacggatgggtaaaaaagggagggcatgtaaccctttttatcgatagaggaagtataaaaattaaacaagacgttagagacaagagacgtaaatattctaaattaaccaaggacagaaaaatgctagaattagaaaagtgtacatccgaaatacaaaatgttaccggatttatggaagaagaaataaaggcagaaatgcaattaaaaatcgataaactcacatttcaaatatatttatctgattctgataacataaaaatatcattgaatgagatactaacacatttcaacaataatgagaatgttacattattttattgtgatgaacgagacgcagaattcgttatgtgtctcgaggctaaaacacatttctctaccacaggagaatggccgttgataataagtaccgatcaggatactatgctatttgcatctactgataatcatcctaagatgataaaaaacttaactcaactgtttaaatttgttccctcggcagaggataactatttagcaaaattaacggcgttagtgaatggatgtgatttctttcctggactctatggggcatctataacacccaccaacttaaacaaaatacaattgtttagtgattttacaatcgataatatagtcactagtttggcaattaaaaattattatagaaagactaactctaccgtagacgtgcgtaatattgttacgtttataaacgattacgctaatttagacgatgtctactcgtatgttcctccttgtcaatgcactgttcaagaatttatattttccgcattagatgaaaaatggaacaattttaaatcatcttatttagagaccgttccgttaccctgccaattaatgtatgcattagaaccacgcaaggagattgatgtttcagaagttaaaactttatcatcttatatagatttcgaaaatactaaatcagatatcgatgttataaaatctatatcttcgatcttcggatattctaacgaaaactgtaacactatagtgttcggcatctataaggataatttactactgagtataaatagttcattttactttaacgatagtctgttaataaccaatactaaaagtgataatataataaatataggttactagattaaaaatggtgttccaactcgtgtgctctacgtgcggcaaagatatttctcacgaacgatataaattgattatacgaaaaaaatcattaaaggatgtactcgtcagtgtaaagaacgaatgttgtaggttaaaattatctacacaaatagaacctcaacgtaacttaacagtgcaacctctattggatataaactaatatggatccggttaattttatcaagacatatgcgcctagaggttctattatttttattaattataccatgtcattaacaagtcatttgaatccatcgatagaaaaacatgtgggtatttattatggtacgttattatcggaacacttggtagttgaatctacctatagaaaaggagttcgaatagtcccattggatagtttttttgaaggatatcttagtgcaaaagtatacatgttagagaatattcaagttatgaaaatagcagctgatacgtcattaactttattgggtattccgtatggatttggtcataatagaatgtattgttttaaattggtagctgaatgttataaaaatgccggtattgatacatcgtctaaacgaatattaggtaaagatatttttctgagccaaaacttcacagatgataatagatggataaagatatatgattctaataatttaacattttggcaaattgattaccttaaagggtgagttaatatgcataactactcctccgttgttttttccctcgttctttttcttaacgttgtttgccatcactctcataatgtaaagatattctaaaatggtaaacttttgcatatcggacgcagaaattggtataaatgttgtaattgtattatttcccgtcaatggactagtcacagctccatcagttttatatcctttagagtatttctcactcgtgtctaacattctagagcattccatgatctgtttatcgttgatattggccggaaagatagattttttattttttattatattactattggcaattgtagatataacttctggtaaatatttttctaccttttcaatctcttctattttcaagccggctatatattctgctatattgttgctagtatcaataccttttctggctaagaagtcatatgtggtattcactatatcagttttaactggtagttccattagcctttccacttctgcagaataatcagaaattggttctttaccagaaaatccagctactataataggctcaccgatgatcattggcaaaatcctatattgtaccagattaatgagagcatatttcatttccaataattctgctagttcttgagacattgatttatttgatgaatctagttggttctctagatactctaccatttctgccgcatacaataacttgttagataaaatcagggttatcaaagtgtttagcgtggctagaatagtgggcttgcatgtattaaagaatgcggtagtatgagtaaaccgttttaacgaattatatagtctccagaaatctgtggcgttacatacatgagccgaatgacatcgaagattgtccaatatttttaatagctgctctttgtccattatttctatatttgactcgcaacaattgtagataccattaatcactgattcctttttcgatgccggacaatagcacaattgtttagctttggactctatgtattcagaattaatagatatatctctcaatacagattgcactatacattttgaaactatgtcaaaaattgtagaacgacgctgttctgcagccatttaactttaaataatttacaaaaatttaaaatgagcatccgtataaaaatcgataaactgcgccaaattgtggcatatttttcagagttcagtgaagaagtatctataaatgtagactcgacggatgagttaatgtatatttttgccgccttgggcggatctgtaaacatttgggccattatacctctcagtgcatcagtgttctaccgcggagccgaaaacattgtgtttaatcttcctgtgtccaaggtaaaatcgtgtttgtgtagttttcacaatgatgccatcatagatatagaacctgatctggaaaataatctagtaaaactttctagttatcatgtagtaagtgtcgattgtaacaaggaactgatgcctattaggacagatactactatttgtctaagtatagatcaaaagaaatcttacgtgtttaattttcacaagtatgaagaaaaatgttgtggtagaaccgtcattcatttagaatggttgttgggctttatcaagtgtattagtcagcatcagcatttggctattatgtttaaagatgacaatattattatgaagactcctggtaatactgatgcgttttccagggaatattctatgactgaatgttctcaagaactacaaaagttttctttcaaaatagctatctcgtctctcaacaaactacgaggattcaaaaagagagtcaatgtttttgaaactagaatcgtaatggataatgacgataacattctaggaatgttgttttcggatagagttcaatcctttaagatcaacatctttatgacgtttttagattaatactttcaatgagataaatatgggtggcagagtaagtgttgagctccctaaacgggatccgcctccgggagtacccactgatgagatgttattaaacgtggataaaatgcatgacgtgatagctcccgctaagcttttagaatatgtgcatataggaccactagcaaaagataaagaggataaagtaaagaaaagatatccagagtttagattagtcaacacaggacccggtggtctttcggcattgttaagacaatcgtataatggaaccgcacccaattgctgtcgcacttttaatcgtactcattattggaaaaaggatggaaagatatcagataagtatgaagagggtgcagtattagaatcgtgttggccagacgttcacgacactggaaaatgcgatgttgatttattcgactggtgtcagggggatacgttcgatagaaacatatgccatcagtggatcggttcagcctttaataggagtgatagaactgtagagggtcaacaatcgttaataaatctgtataataagatgcaaacattatgtagtaaagatgctagtgtaccaatatgtgaatcatttttgcatcatttacgcgcacacaatacagaagatagcaaagagatgatcgattatattctaagacaacagtctgcggactttaaacagaaatatatgagatgtagttatcccactagagataagttagaagagtcattaaaatatgcggaacctcgagaatgttgggatccagagtgttcgaatgccaatgttaatttcttactaacacgtaattataataatttaggactttgcaatattgtacgatgtaatactagcgtgaacaacttacagatggataaaacttcctcattaagattgtcatgtggattaagcaatagtgatagattttctactgttcccgtcaatagagcaaaagtagttcaacataatattaaacattcgttcgacctaaaattgcatttgatcagtttattatctctcttggtaatatggatactaattgtagctatttaaatgggtgccgcggcaagcatacagacgacggtgaatacactcagcgaacgtatctcgtctaaattagaacaagaagcgaacgctagtgctcaaacaaaatgtgatatagaaatcggaaatttttatatccgacaaaaccatggatgtaacctcactgttaaaaatatgtgctctgcggacgcggatgctcagttggatgctgtgttatcagccgctacagaaacatatagtggattaacaccggaacaaaaagcatacgtaccagctatgtttactgctgcgttaaacattcagacgagtgtaaacactgttgttagagattttgaaaattatgtgaaacagacttgtaattctagcgcggtcgtcgataacaaattaaagatacaaaacgtaatcatagatgaatgttacggagccccaggatctccaacaaatttggaatttattaatacaggatctagcaaaggaaattgtgccattaaagcgttgatgcaattgacgactaaggccactactcaaatagcacctagacaagttgctggtacaggagttcagttttatatgattgttatcggtgttataatattggcagcgttgtttatgtactatgccaagcgtatgttgttcacatccaccaatgataaaatcaaacttattttagccaataaggaaaacgtccattggactacttacatggacacattctttagaacttctccgatggttattgctaccacggatatgcaaaactgaaaatatattgataatattttaatagattaacatggaagttatcgctgatcgtctagacgatatagtgaaacaaaatatagcggatgaaaaatttgtagattttgttatacacggtctagagcatcaatgtcctgctatacttcgaccattaattaggttgtttattgatatactattatttgttatagtaatttatatttttacggtacgtctagtaagtagaaattatcaaatgttgttggcgttggtggcgctagtcatcacattaactattttttattactttatactataatagtactagactgacttctaacaaacatctcacctgccataaataaatgcttgatattaaagtcttctatttctaacactattccatctgtggaaaataatactctgacattatcgctaattgacacatcggtgagtgatatgcctataaagtaataatcttctttgggcacatataccagtgtaccaggttctaacaacctatttactggtgctcctgtagcatactttttctttaccttgagaatatccatcgtttgcttggtcaatagcgatatgtgattttttatcaaccactcaaaaaagtaattggagtgttcatatcctctacgggctattgtctcatggccgtgtatgaaatttaagtaacacgactgtggtagatttgttctatagagccggttgccgcaaatagatagaactaccaatatgtctgtacaaatgttaaacattaattgattaacagaaaaaacaatgttcgttctgggaatagaaaccagatcaaaacaaaattcgttagaatatatgccacgtttatacatggaatataaaataactacagtttgaaaaataacagtatcatttaaacatttaacttgcggggttaatttcacaactttactgtttttaaactgttcaaaatatagcatcgatccatgagaaatacgtttagccgcctttaatagaggaaatcccaccgcctttctggatctcaccaacgacgatagttctgaccagcaacttatttcttcatcatccacctgttttaacatataataggcaggagatagatatccgtcattgcaatattccttttcgtaggcacacaatctaatattgataaaatctccattctcttctctgcatttattatcttgtttcggtggctgattaggctgtagtcttggtttaggctttggtatatcgttgttgaatctattttggtcattaaatctttcatttcttcctggtatatttctatcacctcgtttggttggatttttgtctatattatcgtttgtaacatcggtacgggtattcatttatcacaaaaaaaacttctctaaatgagtctactgctagaaaacctcatcgaagaagataccatattttttgcaggaagtatatctgagtatgatgatttacaaatggttattgccggcgcaaaatccaaatttccaagatctatgctttctatttttaatatagtacctagaacgatgtcaaaatatgagttggagttgattcataacgagaatatcacaggggcaatgtttaccacaatgtataatataagaaacaatttgggtctaggagatgataaactaactattgaagccattgaaaactatttcttggatcctaacaatgaggttatgcctcttatcattaataatacggatatgactgccgtcattcctaaaaaaagtggtaggagaaagaataagaacatggttattttccgtcaaggatcatcacctatcttgtgtattttcgaaactcgtaaaaagattaatatttataaagaaaatatggaatccgcgtcgactgagtatacacctatcggagacaacaaggctttgatatctaaatatgcgggaattaatgtcctgaatgtgtattctccttccacatccatgagattgaatgccatttacggattcaccaataaaaataaactagagaaacttagtactaataaggaactagaatcgtatagttctagccctcttcaagaacccattaggttaaatgattttctgggactattggaatgtgttaaaaagaatattcctctaacagatattccgacaaaggattgattactataaatggagaatgttcctaatgtatactttaatcctgtgtttatagagcccacgtttaaacattctttattaagtgtttataaacacagattaatagttttatttgaagtattcattgtattcattctaatatatgtattttttagatctgaattaaatatgttcttcatgcctaaacgaaaaatacccgatcctattgatagattacgacgtgctaatctagcgtgtgaagacgataaattaatgatctatggattaccatggatgacaactcaaacatctgcgttatcaataaatagtaaaccgatagtgtataaagattgtgcaaagcttttgcgatcaataaatggatcacaaccagtatctcttaacgatgttcttcgcagatgatgattcattttttaagtatttggctagtcaagatgatgaatcttcattatctgatatattgcaaatcactcaatatctagactttctgttattattattgatccaatcaaaaaataaattagaagccgtgggtcattgttatgaatctctttcagaggaatacagacaattgacaaaattcacagactttcaagattttaaaaaactgtttaacaaggtccctattgttacagatggaagggtcaaacttaataaaggatatttgttcgactttgtgattagtttgatgcgattcaaaaaagaatcctctctagctaccaccgcaatagatcctattagatacatagatcctcgtcgcgatatcgcattttctaacgtgatggatatattaaagtcgaataaagtgaacaataattaattctttattgtcatcatgaacggcggacatattcagttgataatcggccccatgttttcaggtaaaagtacagaattaattagacgagttagacgttatcaaatagctcaatataaatgcgtgactataaaatattctaacgataatagatacggaacgggactatggacgcatgataagaataattttgaagcattggaagcaactaaactatgtgatgtcttggaatcaattacagatttctccgtgataggtatcgatgaaggacagttctttccagacattgttgaattctgtgagcgtatggcaaacgaaggaaaaatagttatagtagccgcactcgatgggacatttcaacgtaaaccgtttaataatattttgaatcttattccattatctgaaatggtggtaaaactaactgctgtgtgtatgaaatgctttaaggaggcttccttttctaaacgattgggtgaggaaaccgagatagagataataggaggtaatgatatgtatcaatcggtgtgtagaaagtgttacgtcggctcataatattatattttttatctaaaaaactaaaaataaacattgattaaattttaatataatacttaaaaatggatgttgtgtcgttagataaaccgtttatgtattttgaggaaattgataatgagttagattacgaaccagaaagtgcaaatgaggtcgcaaaaaaactgccgtatcaaggacagttaaaactattactaggagaattattttttcttagtaagttacagcgacacggtatattagatggtgccaccgtagtgtatataggatctgctcccggtacacatatacgttatttgagagatcatttctataatttaggagtgatcatcaaatggatgctaattgacggccgccatcatgatcctattttaaatggattgcgtgatgtgactctagtgactcggttcgttgatgaggaatatctacgatccatcaaaaaacaactgcatccttctaagattattttaatttctgatgtgagatccaaacgaggaggaaatgaacctagtacggcggatttactaagtaattacgctctacaaaatgtcatgattagtattttaaaccccgtggcgtctagtcttaaatggagatgcccgtttccagatcaatggatcaaggacttttatatcccacacggtaataaaatgttacaaccttttgctccttcatattcagctgaaatgagattattaagtatttataccggtgagaacatgagactgactcgagttaccaaatcagacgctgtaaattatgaaaaaaagatgtactaccttaataagatcgtccgtaacaaagtagttgttaactttgattatcctaatcaggaatatgactattttcacatgtactttatgctgaggaccgtgtactgcaataaaacatttcctactactaaagcaaaggtactatttctacaacaatctatatttcgtttcttaaatattccaacaacatcaactgaaaaagttagtcatgaaccaatacaacgtaaaatatctagcaaaaattctatgtctaaaaacagaaatagcaagagatccgtacgcagtaataaatagaaacgtactactgagatatactaccgatatagagtataatgatttagttactttaataaccgttagacataaaattgattctatgaaaactgtgtttcaggtatttaacgaatcatccataaattatactccggttgatgatgattatggagaaccaatcattataacatcgtatcttcaaaaaggtcataacaagtttcctgtaaattttctatacatagatgtggtaatatctgacttatttcctagctttgttagactagatactacagaaactaatatagttaatagtgtactacaaacaggcgatggtaaaaagactcttcgtcttcccaaaatgttagagacggaaatagttgtcaagattctctaccgtcctaatataccattaaaaattgttagatttttccgcaataacatggtaactggagtagagatagccgatagatctgttatttcagtcgctgattaatcaattagtagagatgagataagaacattataataatcaataatatattttatatcttatatcttgtttagaaaaatgctaatattaaaatagctaacgctagtaatccaatcggaagccatttgatatctataatagggtatctaatttcctgattcagatagcggacagctatattctcggtagctactcgtttggaatcacaaacattatttacatctaatttactatctgtaatggaaacgtttcccaatgaaatggtacaatccgatacattgcattttgttatatttttttttaaagaggctggtaacaacgcatcgcttcgtttacatggctcgtaccaacaataatagggtaatcttgtatctattcctatccgtactatgcttttatcaggataaatacatttacatcgtatatcgtctttgttagcatcacagaatgcataaatttgttcgtccgtcatgataaaaatttaaagtgtaaatataactattattttatagttgtaataaaaagggaaatttgattgtatactttcggttctttaaaagaaactgacttgataaaaatggctgtaatctctaaggttacgtatagtctatatgatcaaaaagagattaatgctacagatattatcattagtcatgttaaaaatgacgacgatatcggtaccgttaaagatggtagactaggtgctatggatggggcattatgtaaaacttgtgggaaaacggaattggaatgtttcggtcactggggtaaagtaagtatttataaaactcatatagttaagcctgaatttatttcagaaattattcgtttactgaattatatatgtattcactgcggattattgcgttcacgagaaccgtattccgacgatattaacctaaaagagttatcgggacacgctcttaggagattaaaggataaaatattatccaagaaaaagtcatgttggaacagtgaatgtatgcaaccgtatcaaaaaattactttttcaaagaaaaaggtttgtttcgtcaacaagttggatgatattaacgttcctaattctctcatctatcaaaagttaatttctattcatgaaaagttttggccattattagaaattcatcaatatccagctaacttattttatacagactactttcccatccctccgttgattattagaccggctattagtttttggatagatagtatacccaaagaaaccaatgaattaacttacttattaggtatgatcgttaagaattgtaacttgaatgctgatgaacaggttatccagaaggcggtaatagaatacgatgatattaaaattatttctaataacacttccagtatcaatttatcatatatcacatccggcaaaaataatatgattagaagttatatcgtcgcccggcgaaaagatcagaccgctagatctgtaattggtcccagtacatctatcaccgttaatgaggtaggaatgcccgcatatattagaaatacacttacagaaaagatatttgttaatgcctttacagtggataaagttaaacaactattagcgtcaaaccaagttaaattttactttaataaacgattaaaccaattaacaagaatacgccaaggaaagtttatcaaaaataaaatacatttattgcctggtgattgggtagaagtagctgttcaagaatatacaagtattatttttggaagacagccgtctctacatagatacaacgtcatcgcttcatctatcagagctaccgaaggagatactatcaaaatatctcccggaattgtcaactctcaaaatgctgatttcgacggagatgaagaatggatgatattggagcaaaatcctaaagccgtaattgaacaaagtattcttatgtatccgacgacgttactcaaacacgatattcatggagcccccgtttatggatctattcaagatgaaatcgtagcagcgtattcattgtttaggatacaagatctttgtttagatgaagtattgaacatcttggggaaatatggaagagagttcgatcctaaaggtaaatgtaaattcagcggtaaagatatctatacttacttgataggtgaaaagattaattatccgggtctcttaaaggatggtgaaattattgcaaacgacgtagatagtaattttgttgtggctatgaggcatctgtcattggctggactcttatccgatcataagtcgaacgtggaaggtatcaactttattatcaagtcatcttatgtttttaagagatatctatctatttacggttttggggtgacattcaaagatctgagaccaaattcgacgttcactaataaattggaggccatcaacgtagaaaaaatagaacttatcaaagaagcatacgccaaatatctcaacgatgtaagagacgggaaaatagttccattatctaaagctttagaggcggactatgtggaatccatgttatccaacttgacaaatcttaatatccgagagatagaagaacatatgagacaaacgctgatagatgatccagataataacctcctgaaaatggccaaagcgggttataaagtaaatcccacagaactaatgtatattctaggtacttatggacaacagaggattgatggtgaaccagcagagactcgagtattgggtagagtcttaccttactatcttccagactctaaggatccagaaggaagaggttacattcttaattctttaacaaaaggattaacgggttctcaatattacttttcgatgctggttgcaagatctcaatctactgatatcgtctgtgaaacatcacgtaccggaacactggctagaaaaatcattaaaaagatggaggatatggtggtcgacggatacggacaagtagttataggtaatacgctcatcaagtacgccgccaattataccaaaattctaggctcagtatgtaaacctgtagatcttatctatccagatgagtccatgacttggtatttggaaattagtgctctgtggaataaaataaaacagggattcgtttactctcagaaacagaaacttgcaaaaaagacattggcgccgtttaatttcctagtattcgtcaaacccaccactgaggataatgctattaaggttaaggatctgtacgatatgattcataacgtcattgatgatgtgagagagaaatacttctttacggtatctaatatagattttatggagtatatattcttgacgcatcttaatccttctagaattagaattacaaaagaaacggctatcactatctttgaaaagttctatgaaaaactcaattatactctaggtggtggaactcctattggaattatttctgcacaggtattgtctgagaagtttacacaacaagccctgtccagttttcacactactgaaaaaagtggtgccgtcaaacaaaaacttggtttcaacgagtttaataacttgactaatttgagtaagaataagaccgaaattatcactctggtatccgatgatatctctaaacttcaatctgttaagattaatttcgaatttgtatgtttgggagaattaaatccaaacatcactcttcgaaaagaaacagataggtatgtagtagatataatagtcaatagattatacatcaagagagcagaaattaccgaattagtcgtcgaatatatgattgaacgattcatctcctttagcgtcattgtaaaggaatggggtatggaaacattcattgaggatgaggataatattagatttactgtctacctaaatttcgttgaaccggaagaattgaatcttagtaagtttatgatggttcttccgggtgccgccaacaagggcaagattagtaaattcaagattcctatctctgattatacgggatatgacgacttcaatcaaacaaaaaagctcaataagatgactgtagaactcatgaatctaaaagaattgggttctttcgatttggaaaacgtcaacgtgtatcctggagtatggaatacatacgatatcttcggtatcgaggccgctcgtgaatacttgtgcgaagccatgttaaacacctatggagaagggttcgattatctgtatcagccttgtgatcttctcgctagtttactatgtgctagttacgaaccagaatcagtgaataaattcaagttcggcgcagctagtactcttaagagagctacgttcggagacaataaagcattgttaaacgcggctcttcataaaaagtcagaacctattaacgataatagtagctgccacttttttagcaaggtccctaatataggaactggatattacaaatactttatcgacttgggtcttctcatgagaatggaaaggaaactatctgataagatatcttctcaaaagatcaaggaaatggaagaaacagaagacttttaattcttatcaataacatatttttctatgatctgtcttttaaacgatggattttccacaaatgcgcctctcaagtccctcatagaatgatacacgtataaaaaatatagcataggcaatgactccttatttttagacattagatatgccaaaatcatagccccgcttctatttactcccgcagcacaatgaaccaacacgggctcgtttcgttgatcacatttagataaaaaggcggttacgtcgtcaaaatatttactaatatcggtagttgtatcatctaccaacggtatatgaataatattaatattagagttaggtaatgtatatttatccatcgtcaaatttaaaacatatttgaacttaacttcagatgatggtgcatccatagcatttttataatttcccaaatacacattattggttactcttgtcattatagtgggagatttggctttgtgcatatctccagttgaacgtagtagtaagtatttatacaaacttttcttatccatttataacgtacaaatggataaaactactttatcggtaaacgcgtgtaatttagaatacgttagagaaaaggctatagtaggcgtacaagcagccaaaacatcaacacttatattctttgttattatattggcaattagtgcgctattactctggtttcagacgtctgataatccagtctttaatgaattaacgagatatatgcgaattaaaaatacggttaacgattggaaatcattaacggatagcaaaacaaaattagaaagtgatagaggtagacttctagccgctggtaaggatgatatattcgaattcaaatgtgtggatttcggcgcctattttatagctatgcgattggataagaaaacatatctgccgcaagctattaggcgaggtactggagacgcgtggatggttaaaaaggcggcaaaggtcgatccatctgctcaacaattttgtcagtatttgataaaacacaagtctaataatgttattacttgtggtaatgagatgttaaatgaattaggttatagcggttattttatgtcaccgcattggtgttccgattttagtaatatggaatagtgttagataaatgcggtaacgaatgttcctgtaaggaaccataacagcttagatttaacgttaaagatgagcataaacataataaacaaaattacaatcaaacctataacattaatatcaaacaatccaaaaaatgaaatcagtggagtagtaaacgcgtacataactcctggataacgtttagcagctgccgttcctattctagaccaaaaattcggtttcatgttttcgaaacggtattctgcaacaagtcgaggatcgtgttctacatatttggcggcgttatccagtatctgcctattgatcttcatttcgttttcgattctggctatttcaaaataaaatcccgatgatagacctccagactttataatttcatctacgatgttcagcgccgtagtaactctaataatataggctgataagctaacatcataccctcctgtatatgtgaatatggcatgatttttgtccattacaagctcggttttaactttattgcctgtaataatttctctcatctgtaggatatctatttttttgtcatgcattgccttcaagacgggacgaagaaacgtaatatcctcaataacgttatcgttttctacaataactacatattctacctttttattttctaactcggtaaaaaaattagaatcccatagggctaaatgtctagcgatatttcttttcgtttcctctgtacacatagtgttacaaaaccctgaaaagaagtgagtatacttgtcatcatttctaatgtttcctccagtccactgtataaacgcataatccttgtaatgatctggatcatccttgactaccacaacatttcttttttctggcataacttcattgtcctttacatcatcgaacttctgatcattaatatgctcatgaacattaggaaatgtttctgatggaggtctatcaataactggcacaacaataacaggagttttcaccgccgccatttagttattgaaattaatcatatacaactctttaatacgagttatattttcgtctatccattgtttcacatttacatatttcgacaaaaagatataaaatgcgtattccaatgcttctctgtttaatgaattactaaaatatacaaacacgtcactgtctggcaataaatgatatcttagaatattgtaacaatttattttgtattgcacatgttcgtgatctatgagttcttcttcgaatggcataggatctccgaatctgaaaacgtataaataggagttagaataataatatttgagagtattggtaatatataaactctttagcggtataattagtttttttctctcgatttctatttttagatgtgatggaaaaatgactaattttgtagcattagtatcatgaactctaatcgagatcttaatatcttcgtcacacgttagttctttgaagtttttaagagatgcatcagttggttcgaccgatggagtaggtgcaacaattttttgttcgatgtatgtatgtactggagccattgtcttaactataatggtgcttgtatcgaaaaactttaatgcagataatggaagctcttcgccgcgactttctacatcgtaattgggttctaacgccgatctctgaatggatactagttttctaagttctaatgtgattctctgaaaatgtaaatccaattcctccggcattatagatgtgtatacatcggtaaataaaactatagtatccaacgatcccttctcgcaaattctagtcttaaccaaaaaatcgtatataaccacggagatggcgtatttaagagtggattcttctaccgttttgttcttggatttcatataagaaactataaagtccgcactactgttaagaatgattactaacgcaactatatagtttaaattaagcatcttggaaacataaaataactctgtagacgatacttgactttcgaataagtttgcagacaaacgaagaaagaacagacctctcttaatttcagaagaaaactttttttcgtattcctgacgtctagagtttatatcaataagaaagttaagaattagtcggttaatgttgtatttcattacccaagtttgagatttcataatattatcaaaagacatgataatattaaagataaagcgctgactatgaacgaaatagctatatggttcgctcaagaatatagtcttgttaaacgtggaaacgataactgtatttttaatcacgtcagcggcatctaaattaaatataggtatatttattccacacactctacaatatgccacaccatcttcataataaataaattcgttagcaaaattattaattttagtgaaatagttagcgtcaactttcatagcttccttcaatctaatttgatgctcacacggtgcgaattccactctaacatcccttttccatgcctcaggttcatcgatctctataatatctagttttttgcgtttcacaaacacaggctcgtctctcgcgatgagatctgtatagtaactatgtaaatgataactagatagaaagatgtagctatatagatgacgatcctttaagagaggtatgatgactttaccccaatcagatagactgttgttatggtcttcggaaaaagaatttttataaatttttccagtattttccaaatatacgtacttaacatctaaaaaatccttaatgataataggaatggataatccgtctattttataaagaaatacatatcgcacattatacttttttttggaaatgggaataccgatgtgtctacataaatatgcaaagtctaaatattttttagagaatcttagttggtccaaattcttttccaagtacggtaatagatttttcatattgaacggtatcttcttaatctctggttctagttccgcattaaatgatgaaactaagtcactatttttataactaacgattacatcacctctaacatcatcatttaccagaatactgatcttcttttgtcgtaaatacatgtctaatgtgttaaaaaaaagatcatacaagttatacgtcatttcatctgtggtattcttgtcattgaaggataaactcgtactaatctcttctttaacagcctgttcaaatttatatcctatatacgaaaaaatagcaaccagtgtttgatcatccgcgtcaatattctgttctatcgtagtgtataacaatcgtatatcttcttctgtgatagtcgatacgttataaaggttgataacgaaaatatttttatttcgtgagataaagtcatcgtaggattttggacttatattcgcgtctagtagatatgcttttatttttggaatgatctcaattagaatagtctctttagagtccatttaaagttacaaacaactaggaaattggtttatgatgtataatttttttagtttttatagattctttattctatacttaaaaaatgaaaataaatacaaaggttcttgagggttgtgttaaattgaaagcgagaaataatcataaattatttcattatcgcgatatccgttaagtttgtatcgtaatggcgtggtcaattacaaataaagcggatactagtagcttcacaaagatggctgaaatcagagctcatctaaaaaatagcgctgaaaataaagataaaaacgaggatattttcccggaagatgtaataattccatctactaagcccaaaaccaaacgagccactactcctcgtaaaccagcggctactaaaagatcaaccaaaaaggaggaagtggaagaagaagtagttatagaggaatatcatcaaacaactgaaaaaaattctccatctcctggagtcagcgacattgtagaaagcgtggctgctgtagagctcgatgatagcgacggggatgatgaacctatggtacaagttgaagctggtaaagtaaatcatagtgctagaagcgatctttctgacctaaaggtggctaccgacaatatcgttaaagatcttaagaaaattattactagaatctctgcagtatcgacggttctagaggatgttcaagcagctggtatctctagacaatttacttctatgactaaagctattacaacactatctgatctagtcaccgagggaaaatctaaagttgttcgtaaaaaagttaaaacttgtaagaagtaaatgcgtgcacttttttataaagatggtaaactctttaccgataataattttttaaatcctgtatcagacgataatccagcgtatgaggttttgcaacatgttaaaattcctactcatttaacagatgtagtagtatatgaacaaacgtgggaggaggcgttaactagattaatttttgtgggaagtgattcaaaaggacgtagacaatacttttacggaaaaatgcatgtacagaatcgcaacgctaaaagagatcgtatttttgttagagtatataacgttatgaaacgaattaattgttttataaacaaaaatataaagaaatcgtccacagattccaattatcagttggcggtttttatgttaatggaaactatgttttttattagatttggtaaaatgaaatatcttaaggagaatgaaacagtagggttattaacactaaaaaataaacacatagaaataagtcccgatgaaatagttatcaagtttgtaggaaaggacaaagtttcacatgaatttgttgttcataagtctaatagactatataaaccgctattgaaactgacggatgattctagtcccgaagaatttctgttcaacaaactaagtgaacgaaaggtatacgaatgtatcaaacagtttggtattagaatcaaggatctccgaacgtatggagtcaattatacgtttttatataatttttggacaaatgtaaagtccatatctcctcttccgtcaccaaaaaagttaatagcgttaactatcaaacaaactgctgaagtggtaggtcatactccatcaatttcaaaaagagcttatatggcaacgactattttagaaatggtaaaggataaaaattttttagatgtagtatctaaaactacgttcgatgaattcctatctatagtcgtagatcacgttaaatcatctacggatggatgatatagatctttacacaaataattacaagaccgataaatggaaatggataagcgtatgaaatctctcgcaatgacagctttcttcggagagctaaacacattagatattatggcattgataatgtctatatttaaacgccatccaaacaataccattttttcagtggataaggatggtcagtttatgattgatttcgaatacgataattataaggcttctcaatatttggatctgaccctcactccgatatctggagatgaatgcaagactcacgcatcgagtatagccgaacaattggcgtgtgtggatattattaaagaggatattagcgaatatatcaaaactactccccgtcttaaacgatttataaaaaaataccgcaatagatcagatactcgtatcagtcgagatacagaaaagcttaaaatagctctagctaaaggcatagattacgaatatataaaagacgcttgttaataagtaaatgaaaaaaaactagtcgtttataataaaacacaatatggatgccaacatagtatcatcttctactattgcaacgtatatagacgctttagcgaagaatgcttcagaattagaacagaggtctaccgcatacgaaataaataatgaattggaactagtatttattaagccgccattaattactttgacaaatgtagtgaatatctctacgattcaggaatcgtttattcgatttaccgttactaataaggaaggtgttaaaattagaactaagattccattatctaaggtacatggtctagatgtaaaaaatgtacagttagtagatgctatagataacatagtttgggaaaagaaatcattagtgacggaaaatcgtcttcacaaagaatgcttgttgagactatcgacagaggaacgtcatatatttttggattacaagaaatatggatcctctatccgactagaattagtcaatcttattcaagcaaaaacaaaaaactttacgatagactttaagctaaaatattttctaggatccggtgcccagtctaaaagttctttattacacgctattaatcatccaaagtcaaggcctaatacatctctggaaatagaattcacacctagagacaatgaaaaagttccatatgatgaactaataaaggaattgacgactctatcacgtcatatatttatggcttctccagagaatgtaattctttctccgcctattaacgcgcctataaaaacctttatgttgcctaaacaagatatagtaggtttggatctggaaaatctatatgccgtaactaagactgacggaattcctataactatcagagttacatcaaaagggttgtattgttattttacacatcttggttatattattagatatcctgttaagagaataatagattccgaagtagtagtctttggtgaggcagttaaggataagaactggaccgtatatctcattaagctaatagagcctgtgaatgcaatcaatgatagactagaagaaagtaagtatgttgaatctaaactagtggatatttgtgatcggatagtattcaagtcaaagaaatacgaaggtccgtttactacaactagtgaagtcgtcgatatgttatctacatatttaccaaagcaaccagaaggtgttattctgttctattcaaagggacctaaatctaacattgattttaaaattaaaaaggaaaatactatagaccaaactgcaaatgtagtatttaggtacatgtccagtgaaccaattatctttggagaatcgtctatctttgtagagtataagaaatttagcaacgataaaggctttcctaaagaatatggttctggtaagattgtgttatataacggcgttaattatctaaataatatctattgtttggaatatattaatacacataatgaagtgggtattaagtccgtggttgtacctattaagtttatagcagaattcttagttaatggagaaatacttaaacctagaattgataaaaccatgaaatatattaactcagaagattattatggaaatcaacataatatcatagtcgaacatttaagagatcaaagcatcaaaataggagatatctttaacgaggataaactatcggatgtgggacatcaatacgccaataatgataaatttagattaaatccagaagttagttattttacgaataaacgaactagaggaccgttgggaattttatcaaactacgtcaagactcttcttatttctatgtattgttccaaaacatttttagacgattccaacaaacgaaaggtattggcgattgattttggaaacggtgcggacctggaaaaatacttttatggagagattgcgttattggtagcgacggatccggatgctgatgctatagctagaggaaatgaaagatacaacaaattaaactctggaattaaaaccaagtactacaaatttgactacattcaggaaactattcgatccgatacatttgtctctagtgtcagagaagtattctattttggaaagtttaatatcatcgactggcagtttgctatccattattcttttcatccgagacattatgctaccgtcatgaataacttatccgaactaactgcttctggaggcaaggtattaatcactaccatggacggagacaaattatcaaaattaacagataaaaagacttttataattcataagaatttacctagtagcgaaaactatatgtctgtagaaaaaatagctgatgatagaatagtggtatataatccatcaacaatgtctactccaatgactgaatacattatcaaaaagaacgatatagtcagagtgtttaacgaatacggatttgttcttgtagataacgttgatttcgctacaattatagaacgaagtaaaaagtttattaatggcgcatctacaatggaagatagaccgtctacaaaaaactttttcgaactaaatagaggagccattaaatgtgaaggtttagatgtcgaagacttacttagttactatgttgtttatgtcttttctaagcggtaaataataatatggtatgggttctgatatccccgttctaaatgcattaaataattccaatagagcgatttttgttcctataggaccttccaactgtggatactctgtattgttaatagatatattaatacttttgtcgggtaacagaggttctacgtcttctaaaaataaaagtttgataacatctggcctgttcataaataaaaacttggcgattctatatatactcttattatcaaatctagccattgtcttatagatgtgagctactgtaggtgtaccatttgattttctttctaatactatatatttctctcgaagaagttcttgcacatcatctgggaataaaatactactgttgagtaaatcagttattttttttatatcgatattgatggacatttttatagttaaggataataagtatcccaaagtcgataacgacgataacgaagtatttatacttttaggaaatcacaatgactttatcagatcaaaattaacaaaattaaaggagcatgtatttttttctgaatatattgtgactccagatacatatggatctttatgcgtcgaattaaatgggtctagttttcagcacggtggtagatatatagaggtggaggaatttatagatgctggaagacaagttagatggtgttctacatccaatcatatatctgaagatatgcacactgataaatttgtcatttatgatatttatacgtttgattcgttcaagaataaacgattggtatttgtacaggtgcctccatcattaggagatgatagctatttgactaatccgttattgtctccgtattatcgtaattcagtagccagacaaatggtcaatgatatgatttttaatcaagattcatttttaaaatatttattagaacatctgattagaagccactatagagtttctaaacatataacaatagttagatacaaggataccgaagaattaaatctaacgagaatatgttataatagagataagtttaaggcgtttgtattcgcttggtttaacggcgtttcggaaaatgaaaaggtactagatacgtataaaaaggtatctaatttgatataatgaattcagtgactgtatcacacgcgccatatactattacttatcacgatgattgggaaccagtaatgagtcaattggtagagttttataacgaagtagccagttggctgctacgagacgagacgtcgcctattcctgataagttctttatacagttgaaacaaccgcttagaaataaacgagtatgtgtgtgtggtatagatccgtatccgaaagatggaactggtgtaccgttcgaatcaccaaattttacaaaaaaatcaattaaggagatagcttcatctatatctagattaaccggagtaattgattataaaggttataaccttaatataatagacggggttataccctggaattattacttaagttgtaaattaggagaaacaaaaagtcacgcgatctactgggataagatttccaagttactgctgcagcatataactaaacacgttagtgttctttattgtttgggtaaaacagatttctcgaatatacgggcaaagttagaatccccggtaactaccatagtcggatatcatccagcggctagagaccgccaattcgagaaagatagatcatttgaaattatcaacgttttactggaattagacaacaaggcacctataaattgggctcaagggtttatttattaatgctttagtgaaattttaacttgtgttctaaatggatgcaactattagaggtaatgatgttatctttgttcttaagactataggtgtcccgtcagcgtgcagacaaaatgaagatccaagatttgtagaagcatttaaatgcgacgagttagaaagatatattgagaataatccagaatgtacactattcgaaagtcttagggatgaggaagcatactctatagtcagaattttcatggatgtagatttagacgcgtgtctagacgaaatagattatttaacggctattcaagattttattatcgaggtgtcaaactgtgtagctagattcgcgtttacagaatgcggtgccattcatgaaaatgtaataaaatccatgagatctaatttttcattgactaagtctacaaatagagataaaacaagttttcatattatctttttagacacgtataccactatggatacattgatagctatgaaacgaacactattagaattaagtagatcatctgaaaatccactaaccagatcgatagacactgccgtatataggagaaaaacaactcttcgggttgtaggtactaggaaaaatccaaattgcgacactattcatgtaatgcaaccaccgcatgataatatagaagattacctattcacttacgtggatatgaacaacaatagttattacttttctctacaacgacgattggaggatttagttcctgataagttatgggaaccagggtttatttcattcgaagacgctataaaaagagtttcaaaaatattcattaattctataataaactttaatgatctcgatgaaaataattttacaacggtaccactggtcatagattacgtaacaccttgtgcattatgtaaaaaacgatcgcataaacatccgcatcaactatcgttggaaaatggtgctattagaatttacaaaactggtaatccacatagttgtaaagttaaaattgttccgttggatggtaataaactgtttaatattgcacaaagaattttagacactaactctgttttattaaccgaacgaggagaccatatagtttggattaataattcatggaaatttaacagcgaagaacccttgataacaaaactaattctgtcaataagacatcaactacctaaggaatattcaagcgaattactctgtccgaggaaacgaaagactgtagaagctaacatacgagacatgttaatagattcagtggagaccgatacctatccggataaacttccgtttaaaaatggtgtattggacctggtagacggaatgttttactctggagatgatgctaaaaaatatacgtgtactgtatcaaccggatttaaatttgacgatacaaagttcgtcgaagacagtccagaaatggaagagttaatgaatatcattaacgatatccaaccattaacggatgaaaataagaaaaatagagagttgtacgaaaaaactttatctagttgtttatgcggtgctaccaaaggatgtttaacattcttttttggagaaactgcaactggaaagtcgacaaccaaacgtttgttaaagtctgctatcggtgacctgtttgttgagacgggtcaaacaattttaacagatgtattggataaaggacctaatccatttatcgctaacatgcatttgaaaagatctgtattctgtagcgaactacctgattttgcctgtagtggatcaaagaaaattagatctgacaatattaaaaagttgacagaaccttgtgtcattggaagaccgtgtttctccaataaaattaataatagaaaccatgcgacaatcattatcgatactaattacaaacctgtctttgataggatagataacgcattaatgagaagaattgccgtcgtgcgattcagaacacacttttctcaaccttctggtagagaggctgctgaaaataatgacgcgtacgataaagtcaaactattagacgaggggttagatggtaaaatacaaaataatagatatagattcgcatttctatacttgttggtgaaatggtacaaaaaatatcatgttcctattatgaaactatatcctacaccggaagagattccggactttgcattctatctcaaaataggtactctgttagtatctagctctgtaaagcatattccattaatgacggacctctccaaaaagggatatatattgtacgataatgtggttactcttccgttgactactttccaacagaaaatatccaagtattttaattctagactatttggacacgatatagagagcttcatcaatagacataagaaatttgccaatgttagtgatgaatatctgcaatatatattcatagaggatatttcatctccgtaaatatatgctcatatatttatagaagatatcacatatctaaatgaataccggaatcatagatttatttgataatcatgttgatagtataccaactatattacctcatcagttagctactctagattatctagttagaactatcatagatgagaacagaagcgtgttattgttccatattatgggatcaggtaaaacaataatcgctttgttgttcgccttggtagcttccagatttaaaaaggtttacattctagtgcctaatattaacattttgaaaatttttaattataatatgggtgtagctatgaacttgtttaatgacgaattcatagctgagaatatctttattcattccacaacaagtttttattctcttaattataacgataacgtcattaattataacggattatctcgctacaataactctatttttatcgttgatgaggcacataatatctttgggaataatactggagaacttatgaccgtgataaaaaataaaaacaagattccttttttactattgtctggatctcccattactaacacacctaatactctgggtcatattatagatttaatgtccgaagagacgatagattttggtgaaattattagtcgtggtaagaaagtaattcagacacttcttaacgaacgaggtgtgaatgtacttaaggatttgcttaaaggaagaatatcatattacgaaatgcctgataaagatctaccaacgataagatatcacggacgtaagtttctagatactagagtagtatattgtcacatgtctaaacttcaagagagagattatatgattactagacgacagctatgttatcatgaaatgtttgataaaaatatgtataacgtgtcaatggcagtattgggacaacttaatctgatgaataatttagatactttatttcaggaacaggataaggaattgtacccaaatctgaaaataaataatggcgtgttatacggagaagaattggtaacgttaaacattagttccaaatttaaatactttattaatcggatacagacactcaacggaaaacattttatatacttttctaattctacatatggcggattggtaattaaatatatcatgctcagtaatggatattctgaatataatggttctcagggaactaatccacatatgataaacggcaaaccaaaaacatttgctatcgttactagtaaaatgaaatcgtctttagaggatctattagatgtgtataattctcctgaaaacgatgatggcagtcaattgatgtttttgttttcgtcaaacattatgtccgaatcctatactctgaaagaggtaaggcatatttggtttatgactatcccagatactttttctcaatacaaccaaattcttggacgatctattagaaaattctcttacgccgatatttctgaaccagttaatgtatatcttttagccgccgtatattccgatttcaatgacgaagtgacgtcattaaacgattacacacaggatgaattaattaatgttttaccatttgacatcaaaaagctgttgtatctaaaatttaagactaaagaaacgaatagaatatactctattcttcaagagatgtctgaaacgtattctcttccaccacatccatcaattgtaaaagttttattgggagaattggtcagacaatttttttataataattctcgtattaagtataacgataccaagttacttaaaatggttacatcagttataaaaaataaagaagacgctaggaattacatagatgatattgtaaacggtcacttctttgtatcgaataaagtatttgataaatctcttttatacaaatacgaaaacgatattattacagtaccgtttagactttcctacgaaccatttgtttggggagttaactttcgtaaagaatataacgtggtatcttctccataaaactgatgagatatataaagaaataaatgtcgagctttgttaccaatggataccttccagttacattggagccacacgagctgacgttagacataaaaactaatattaggaatgccgtatataagacgtatctccatagagaaattagtggtaaaatggccaagaaaatagaaattcgtgaagacgtggaattacctctcggcgaaatagttaataattctgtagttataaacgttccgtgtgtaataacctacgcgtattatcacgttggggatatagtcagaggaacattaaacatcgaagatgaatcaaatgtaactattcaatgtggagatttaatctgtaaactaagtagagattcgggtactgtatcatttagcgattcaaagtactgcttttttcgaaatggtaatgcgtatgacaatggcagcgaagtcactgccgttctaatggaggctcaacaaggtatcgaatctagttttgtttttctcgcgaatatcgttgactcataaaaaagagaatagcggtaagtataaacacgaatactatggcaataattgcgaatgttttattcccttcgatatatttttgataatatgaaaaacatgtctctctcaaatcggacaaccatctcataaaatagttctcgcgcgctggagaggtagttgctgctcgtataatctccccagaataatatacttgcgtgtcgtcgttcaatttatacggatttctatagttctctgttatataatgcggttttccatcatgattagacgacgacaatagtgttctaaatttagatagttgatcagaatgaatgtttattggcgttggaaaaattatccatacagcgtctgcagagtggttgatagttgttcctagatatgtaaaataatccaacttactaggcagcaaattgtctagataaaatactgaatcaaacggtgcagacgtattggtggatctaatggaatccaattgattaactatcttttgaaaatatacatttttatgatccgatacttgtaagaatatagaaataatgataagtccatcatcgtgtttttttgcctcttcataagaactatattttttcttattccaatgaacaagattaatctctccagagtatttgtacacatctatcaagtgattggatccataatcgtcttcctttccccaatatatacgtagtgatgataacacatattcattggggagaaaccctccacttatatatcctcctttaaaattaatccttactagttttccagtgttctggatagtggttggtttcgactcattataatgtatgtctaacggcttcaatcgcgcgttagaaattgcttttttagtttctatattaataggagatagttgttgcggcatagtaaaaatgaaatgataactgtttaaaaatagctcttagtatgggaattacaatggatgaggaagtgatatttgaaactcctagagaattaatatctattaaacgaataaaagatattccaagatcaaaagacacgcatgtgtttgctgcgtgtataacaagtgacggatatccgttaataggagctagaagaacttcattcgcattccaagcgatattatctcaacaaaattcagattctatctttagagtatccactaaactattacggtttatgtactacaatgaactaagagaaatctttagacggttgagaaaaggttctatcaacgatatcgatcctcactttgaagagttaatattattgggtggtaaactagataaaaaggaatctattaaagattgtttaagaagagaattaaaagaggaaagtgatgaacgtataacagtaaaagaatttggaaatgtaattctaaaacttacaacacgggataaattatttaataaagtatatataagttattgcatggcgtgttttattaatcaatcgttggaggatttatcgcatactagtatttacaatgtagaaattagaaagattaaatcattaaatgattgtattaacgacgataaatacgaatatctgtcttatatttataatatgctagttaatagtaaatgaacttttacagatctagtataattagtcagattattaagtataatagacgactagctaagtctattatttgcgaggatgactctcaaattattacactcacggcattcgttaaccaatgcctatggtgtcataaacgagtatccgtgtccgctattttattaactactgataacaaaatattagtatgtaacagacgagatagttttctctattctgaaataattagaactagaaacatgtctagaaagaaacgattatttctgaattattccaattatttgtccaaacaggaaagaagtatactatcgtcatttttttctctagatccagctactactgataatgatagaatagatgctatttatccgggtggcatacccaaaaggggtgagaatgttccagagtgtttatccagggaaattaaagaagaagttaatatagacaattcttttgtattcatagacactcggttttttattcatggcatcatagaagataccattattaataaattttttgaggtaatcttctttgtcggaagaatatctttaacgagtgatcaaatcattgatacatttaaaagtaatcatgaaatcaaggatctaatatttttagatccgaattcaggtaatggactccaatacgaaattgcaaaatatgctctagatactgcaaaactcaaatgttatggccatagaggatgttattacgaatcattaaaaaaattaactgaggatgattgattagaaaatataaattaatttaccatcgtgtatttttataacgggattgtccggcatatcatgtagatagttaccgtctacatcgtatactcgaccatctacgcctttaaatcctctatttattgacattaatctattagaattggaataccaaatattagtaccctcaattagtttattggtaatattttttttagacgatagatcgatggctcttgaaaccaaggttttccaaccggactcattgtcgatcggtgagaagtctttttcattagcatgaatccattctaatgatgtatgtttaaacactctaaacaattggacaaattcttttgatttgctttgaatgatttcaaataggtcttcgtctacagtaggcataccattagataatctagccattataaagtgcacgtttacatatctacgttctggaggagtaagaacgtgactattgagacgaatggctcttcctactatctgacgaagagacgcctcgttccatgtcatatctaaaatgaagatatcattaattgagaaaaaactaataccctcgcctccactagaagagaatacgcatgttttaatgcattctccgttagtgtttgattcttggttaaactcagccaccgccttgattctagtatcttttgttctagatgagaactctatattagagataccaaagactttgaaatatagtaataagatttctattcctgactgattaacaaatggttcaaagactagacatttaccatgggatgctaatattcccaaacatacatctataaatttgacgcttttctcttttaattcagtaaatagagagatatcagccgcactagcatcccctttcaatagttctccctttttaaaggtatctaatgcggatttagaaaactctctatctcttaatgaatttttaaaatcattatatagtgttgctatctcttgcgcgtattcgcccggatcacgattttgtctttcaggaaagctatcgaacgtaaacgtagtagccatacgtctcagaattctaaatgatgatatacctgtttttatttcagcgagtttagccttttgataaatttcttcttgctttttcgacatattaacgtatcgcattaatactgttttcttagcgaatgatgcagacccttctacgtcatcaaaaatagaaaactcgttattaactatgtacgaacataggcctcctagtttggagactaattctttctcatcaactagacgtttattctcaaatagcgattggtgttgtaaggatcctggtcgtagtaagttaaccaacatggtgaattcttgcacactattaacgataggtgtagccgataaacaaatcatcttatggttttttaatgcgatggtcttagataaaaaattatatactgaacgagtaggacggatcttaccatcttctttgattaatgatttagaaatgaagttatgacattcatcaataatgacgcatattctactcttggaattaatagttttgatattagtaaaaaatttatttctaaaattttgatcatcgtaattaataaaaatacaatccttcgttatctctggagcgtatctgagtatagtgttcatccaaggatcttctatcaaagcctttttcaccaataagataatagcccaattcgtataaatatccttaagatgtttgagaatatatacagtagtcattgttttaccaacacccgtttcatggaacaataaaagagaatgcatactgtctaatcctaagaaaactcttgctacaaaatgttgataatccttgaggcgtactacgtctgttcccatcatttcaacaggcatattagtagttctgcgcaatgcataatcgatataggccgcgtgtgatttactcatttatgagtgataagtaataactatgttttaaaaatcacagcagtagtttaactagtcttctctgatgtttgttttcgatactttttgaatcagaagtcatactagaataaagcaacgagtgaacgtaatagagagcttcgtatactctattcgaaaactctaagaacttattaatgaattccgtatccactggattgtttaaaatactaaattgaacactgttcacatccttccaagaagaagacttagtgacggacttaacatgagacataaataaatccaaattttttttacaaacatcactagccaccataatggcgctatctttcaaccagctatcgcttacgcattttagcagtctaacatttttaaagagactacaatatattctcatagtatcgattacacctctaccgaataaagttggaagtttaataatacaatatttttcgtttacaaaatcaaataatggtcgaaacacgtcgaaggttaacatcttataatcgctaatgtatagattgttttcagtgagatgattattagatttaatagcatctcgttcacgtttgaacagtttattgtgtgcgctgaggtcggcaactacggcgtccgctttagtactcctcccataatactttacgctattaatctttaaaatttcatagactttatctagatcgctttctggtaacatgatatcatgtgtaaaaagttttaacatgtcggtcggcattctatttagatcattaactctagaaatctgaagaaagtaattagctccgtattccagactaggtaatgggcttttacctaaagacaagttaagttctggcaatgtttcataaaatggaagaaggacatgcgttccctcccggatattttttacaatttcatccatttacaactctatagtttgttttcattattattagttattatctcccataatcttggtaatacttaccccttgatcgtaagataccttatacaggtcattacatacaactaccaattgtttttgtacataatagattggatggttgacatccatggtggaataaactactcgaacagatagtttatctttccccctagatacattggccgtaatagttgtcggcctaaagaatatctttggtgtaaagttaaaagttagggttcttgttccattattgctttttgtcagtagttcattataaattctcgagatgggtccgttctctgaatatagaacatcatttccaaatctaacttctagtctagaaataatatcggtcttattcttaaaatctattcccttgatgaagggatcgttaatgaacaaatccttggcctttgattcggctgatctattatctccgttatagacgttacgttgactagtccaaagacttacaggaatagatgtatcgatgatgttgatactatgtgatatgtgagcaaagattgttctcttagtggcatcactatatgttccagtaatggcggaaaactttttagaaatgttatatataaaagaattttttcgtgttccaaacattagcagattagtatgaagataaacactcatattatcaggaacattatcaatttttacatacacatcagcatcttgaatagaaacgataccatcttctggaacctcaacaatctcggcagactccggataaccagtcggtgggccatcactaacaataactagatcatccaacaatctactcacatatgcatctatataatctttttcatcttgtgagtaccctggatacgaaataaatttattatccgtatttccataataaggtttagtataaacagagagcgatgttgccgcatgaacttcagttacagtcgccgttggttggtttatttgacctattactctcctaggtttctctataaacgatggtttaatttgtacattcttaaccatatatccaataaagctcaattcaggaacataaacaaattctttgttgaacgtttcaaagtcgaacgaagagtcacgaataacgatatcggatactggattgaaggttaccgttacggtaatttttgaatcggatagtttaagactgctgaatgtatcttccacatcaaacggagttttaatataaacgtatactgtagatggttctttaatagtgtcattaggagttaggccaatagaaatatcattaagttcactagaatatccagagtgtttcaaagcaattgtattattgatacaattattatataattcttcgccctcaatttcccaaataacaccgttacacgaagagatagatacgtgattaatacatttatatccaacatatggtacgtaaccgaatcttcccatacctttaacttctggaagttccaaactcagaaccaaatgattaagcgcagtaatatactgatccctaatttcgaagctagcgatagcctgattgtctggaccatcgtttgtcataactccggatagagaaatatattgcggcatatacaaagttggaatttgactatcgactgcgaagacattagaccgtttaatagagtcatccccaccgatcaaagaattaatgatagtattattcattttctatttaaaatggaaaaagcttacaataaactccgtagagaaatatctataatttgtgagttttccttaaagtaacagcttccgtaaacgccgtctttatctcttagtaggtttattgtatttatgaccttttccttatcttcatagaatactaaaggcaacaaagaaatttttggttcttctctaagagctacgtgagacttaaccatagaagccaacgaatccctacatattttagaacagaaatacccaacttcaccacccttgaatgtctcaatactaataggtctaaaaaccaaatcttgattacaaaaccaacacttatcaattacactatttgtcttaatagacacatctgccatagatttataatactttggtagtatacaagcgagtgcttcttctttagcgggcttaaagactgctttaggtgctgaaataaccacatctggaaggcttactcgcttagccatttaattacggaactatttttttatacttctaatgagcaagtagaaaacctctcatctacaaaaacatactcgtgtccataatcctctaccatagttacacgttttttagatctcatatgtgctaaaaagttttcccatactaattggttactattatttttcgtataatttttaacagtttgaggttttagatttttagttacagaagtgatatcgaatattttatccaaaaagaatgaataattaattgtcttagaaggagtgttttcttggcaaaagaataccaagtgcttaaatatttctactacttcattaatcttttctgtactcagattcagtttctcatcttttacttgattgattatttcaaagactaacttataatcctttttatttattctctcgttagccttaagaaaactagatacaaaatttgcatctacatcatccgtggatatttgatttttttccatgatatccaagagttccgagataatttctccagaacattgatgagacaataatctccgcaatacatttctcaaatgaataagtttattagacacatggaagtttgactttttttgtacctttgtacatttttgaaatacagactcgcaaaaaatacaatattcatatccttgttcagatactataccgttgtgtctacaaccgctacataatcgtagattcatgttaacactctacgtatctcgtcgtccaatattttatataaaaacattttatttctagacgttgccagaaaatcctgtaatatttttagttttttgggctgtgaataaagtatcgccctaatatggttaccgtcctccgccaatatagtagttaaattatccgcacatgcagaagaacaccgcttaggcggattcagtacaatgttatatttttcgtaccaactcatttaaatatcataatctaaaatagttctgtaatatgtctagcgctaatatattgatcataatcctgtgcataaattaagatacaacaatgtctcgaaatcatcgacatggcttcttccatagttagaagatcgtcgtcaaagttagcaacgtgattcatcaacatttgctgttttgaggcagcaaatactgaaccgtcgccattcaaccattcataaaaaccatcgtctgaatccattgataatttcttgtactggtttttgagagctcgcatcaatctagcatttctagctcccggattgaaaacagaaagaggatcgtacatccagggtccattttctgtaaatagaatcgtataatgtcccttcaagaagatatcagacgatccacaatcaaagaattggtctccgagtttgtaacaaactgcggactttaacctatacatgataccgtttagcatgatttctggtgatacgtcaatcggagtatcatctattagagatctaaagccggtgtaacattctccaccaaacatattcttattctgacgtcgttctacataaaacatcattgctccattaacgataacaggggaatgaacagcactacccatcacattagttcccaatggatcaatgtgtgtaactccagaacatcttccatatcctatgttaggaggagcgaacaccactcttccactattgccatcgaatgccatagaataaatatccttggaattgatagaaatcggactgtcggatgttgtgatcatcttcataggattaacaactatgtatggtgccgcctgaagtttcatatcgtaactgatgccgtttataggtctagccacagaaaccaacgtaggtctaaatccaactatagacaaaatagaagccaatatctgttcttcatctgtcataacttgagagcatccagtatgaataatcttcattagatggggatctaccgcatcatcatcgttacaataaaaaattcccattctaatgttcataattgcttttctaatcatggtatgcatgtttgctctctgaatctctgtggaaattagatctgatacacctgtaatcactatcggattatcctccgtaagacgattaaccaacaacatataattataagactttacttttctaaattcataaagttgctggattaggctataggtgtctccatgtacatacgcgttctcgagcgcaggaagtttaataccgaatagtgccatcagaataggatgaatatagtaattagtttctggttttctataaataaaagacaaatcttgtgaactagacatatcggtaaaatgcatggattggaatcgtgtagtcgacagaagaatatgatgattagatggagagtatattttatctaactctttgagttggtcaccgattctaggactagctcgagaatgaataagtactaaaggatgagtacatttcacagaaacactagcattgttcaatgtgctctttacatgggtaaggagttgaaatagctcgtttctatttgttctgacaatatttagtttattcataatgttaagcatatcctgaatagtaaagttagatgtgtcatacttgttagtagttagatatttagcaattgcattcccatcatttctcaatctcgtactccaatcatgcgtggatgctacttcgtcgatggaaaccatacaatcctttttgataggctgttgagattgattatttcctgcacgtttaggtttggtacgttgatttctagcccctgcggatataaagtcatcgtctacaattttggataatgaattgcatacactacaagacaaagatttatcagaagtgtgaatatgatcttcatctaccaaagaaagagtttgattagtataactagattttagtcctgcgttagatgttaaaaaaacatcgctattgaccacggcttccattatttatattcgtagtttttactcgaaagcgtgattttaatattcaatcttattacttttggaatcgttcaaaacctttgactaattgtagaatttgatctattgccctacgcgtatactcccttgcatcatatacgttcgtcaccagatcgtttgtttcggcctgaagttggtgcatatctctttcaacattcgacatgagatccttaagggccatatcgtctagattttgttgagatgctgctcctggatttggattttgttgtgctgttgtacatactgtaccaccagtaggtgtaggagtacatacagtggccacaataggaggttgaggaggtgtaaccgttggagtagtacaagaaatacttccatccgattgttgtgtacatgtagttgttggtaacgtctgagaaggttgggtagatggcggcgtcgtcgtcttttgatctttattaaatttagagataatatcctgaacagcattgctcggcgtcaacgctggaaggagtgaactcgccggcgcatcagtatctgcagacagccaatcaaaaagattagacatatcagatgatgtattagtttgttgtcgtggttttggtgtaggagccggtgtagctgttggaaccggctgtggagttatatgaatagttggttgtagcggttggataggctgtctgctggcggccatcatattatctctagctagttgttctcgcaactgtctttgataatacgactcttgagactttagtcctatttcaatcgcttcatcctttttcgtatccggatccttttcttcagaataatagattgacgactttggtgtagaggattctgccagcccctgtgagaacttgttaaagaagtccatttaaggctttaaaattgaattgcgattataagattaaatggcagacacagacgatattatcgactatgaatccgatgatctcaccgaatacgaggatgatgaagaagaggaagaagatggagagtcactagaaactagtgatatagatcccaaatcttcttataagattgtagaatcagcatccactcatatagaagatgcgcattccaatcttaaacatatagggaatcatatatctgctcttaaacgacgctatactagacgtataagtctatttgaaatagcgggtataatagcagaaagctataacttgcttcaacgaggaagattacctctagtttcagaattttctgacgaaacgatgaagcaaaatatgctacatgtaattatacaagagatagaggagggttcttgtcctatagtcatcgaaaagaacggagaattgttgtcggtaaacgattttgacaaagatggtctaaaattccatctagactatattatcaaaatttggaaacttcaaaaacgatattagaatttatacgaatatcgttctctaaatgtcacaatcaagtctcgcatgttcagcaatttattgtcgtactttatatcgtgttcattaacgatatcttgcaaaatagtaatgattctatcttccttcgatagatattcttcagagattattgtcttatattctttcttgttatcagatatgaatttgataagactttgaacattattgatacccgtctgtttaattttttctacagatattttagttttggcagattctatcgtatctgtcaatagacatccaacatcgacattcgacgtcaattgtctataaatcaacgtataaattttagaaataacattagcgaattgttgtgcattgatgtcgttattctgaaacagtatgattttaggtagcattttcttaacaaagagaacgtatttattgttactcagttgaacagatgatatatccagattactaacgcatctgattccatataccaaactttcagaagaaatggtgtacaattgtttgtattcattcaatgtctctttttcagaaattagtttagagtcgaatactgcaataattttcaagagatagttttcatcagataagattttatttagtgtagatatgataaaactattgttttgttggagaacttgatacgccgcgttctctgtagtcgacgctctcaaatgggaaacaatctccattatttttttggaatcggatacaatatcttcggtatcttgacgcaatctagtatacatagagttaagagaaattagagtttgtacattaagcaacatgtctctaaatgtggctgcaaacttttccttttccacatcatctagtttattatataccgatttcacaacggcaccagatttaaggaaccagaatgaaaaactctgataactacaatatttcatcatagttacgattttatcatcttctatagttggtgtaatagcgcatacctttttctccaagactggaaccaacgtcataaaaatgtttaaatcaaaatccatatcaacatctgatgcgctaagaccagtctcgcgttcaagattatctttactaatggtgacgaactcatcgtatagaactctaagtttgtccattatttatttacagatttagttgtttaatttatttgtgctcttccagagttgggatagtatttttctaacgtcggtattatattattaggatctacgttcatatgtatcataatattaatcatccacgttttgataaatctatctttagcttctgaaataacgtatttaaacaaaggagaaaaatatttagctacggcatcagacgcaataacattttttgtaaatgtaacgtatttagacgacagatcttcgttaaaaagttttccatctatgtagaatccatcggttgttaacaccattcccgcgtcagattgaataggagtttgaatagtttgttttggaaatagatccttcaataacttatagttgggtgggaaaaaatcgattttatcactagactctttcttttttactatcattacctcatgaactatttcttgaatgagtatatgtattttctttcctatatcggacgcgttcattggaaaatataccatgtcgttaactataagaatatttttatcctcgtttacaaactgaataatatcagatgtagttcgtaaacgaactatatcatcaccagcacaacatctaactatatgatatccactagtttcctttagtcgtttattatcttgttccatattagcagtcattccatcatttaagaaggcgtcaaagataatagggagaaatgacattttggattctgttacaactttaccaaaattaaggatatacggacttactatctttttctcaacgtcgatttgatgaacacacgatgaaaatgtacttcgatgagattgatcatgtagaaaacaacaagggatacaatatttccacatatcatgaaatatattaagaaatcccaccttattatatttccccaaaggatccatgcatgtaaacattatgccgttatcattaataaagacttctttctcatcggatctgtaaaagttgttactgatttttttcattccaggatctagataattaataatgatgggttttctattcttattctttgtattttggcatatcctagaccagtaaacagtttccactttggtaaaatcagcagacttttgaacgctattaaacatggcattaatggcaataactaaaaatgtaaaatatttttctatgttaggaatatggtttttcactttaatagatatatggtttttggccaaaatgatagatatttttttatccgaggatagtaaaatattattagtcgccgtctctataaaaatgaagctagtctcgatatccaattttattctagaattgataggagtcgccaaatgtaccttatacgttatatctcccttgatgcgttccatttgtgtatctatatcggacacaagatctgtaaatagttttacgttattaatcatcacggtatcgccgtcgctagataacgctaatgtaccatccaagtcccaaatggagagatttaactgttcatcgtttagaataaaatgattaccggtcatattaataaagtgttcatcgtatctagataacaacgacttataattaatgtccaagtcttgaactcgctgaatgatcttttttaacccagttagttttagattggtacgaaatatattgttaaactttgattctacagtaatgtccaaatctagttgtggaaatacttccatcaacattgtttcaaacttgataatattattatctacatcttcatacgatccaaattccggaatagatgtatcgcacgctctggccacccagataaccaaaaagtcacacgctccaggatatacattgtataaaaagctatcgttttttagtagtgtttttttctgagtatatacgaagggattaaaaatagtattatcaacgtaactatattccaaattattcttatgagaatagataataatatcgtccttaatatctaacaaatttcctaaatatccctttaattgagtcattcgaagcgtcaatagaatatgtctcttaactatttccggctgttgtatatttaaatgacttcgtaaaaaataatatatgggcgacttctcatctatgtaatcatatggagtgagatatagggctcgttctacctcctgccccttacccacctgtaataccaattgcggacttactatatatcgcatatttatatcgtggggtaaagtgaaaatctactaccgatgatgtaagtcttacaatgttcgaaccagtaccagatcttaatttggaggcctccgtagaactaggggaggtaaatatagatcaaacaacacctatgataaaggaaaatagcggttttatatcccgtagtagacgtctattcgcccatagatctaaggatgatgagagaaaactagcactacgattctttttacaaagactttattttttagatcatagagagattcattatttgttcagatgcgttgacgctgtaaaagacgtcactattaccaaaaaaaataacattatcgtggcgccttatatagcacttttaactatcgcatcaaaaggatgcaaacttacagaaacaatgattgaagcattctttccagaactatataatgaacatagtaagaaatttaaattcaactctcaagtatccatcatccaagaaaaactcggataccagtttggaaactatcacgtttatgattttgaaccgtattactctacagtagctctggctattcgagatgaacattcatctggcatttttaatatccgtcaagagagttatctggtaagttcattatctgaaataacatatagattttatctaattaatctaaaatctgatcttgttcaatggagtgctagtacgggcgctgtaattaatcaaatggtaaatactgtattgattacagtgtatgaaaagttacaactggtcatagaaaatgattcacaatttacatgttcattggctgtggaatcaaaacttccaataaaattacttaaagatagaaatgaattatttacaaaattcatcaacgagttaaaaaagaccagttcattcaagataagcaaacgcgataaggatacgctactaaaatattttacttaggactggagttagaatttatagacgactcatttcgtttatcattattagtattcttcttgttatcttgttcagaaatatacagcaatgctatgcctaatactaaatacattatcatgcttgcaatggctctaacaacgacgaaccaaaatgaatttggtcgtagcttttgttcacaaaaatacataaagaaatgtctacataaatctatggcgccattggctacttgaaatagcgccagtcctcctacagattttaatatagctgtataacatgacatttattcatcatcaaaagagacagagtcaccatctgtcatatttagattttttttcatgtgttcaaagtatcctctactcatttcattataatagtttatcatacttagaattttaggacggatcaatgagtaagacttgactagatcgtcagtagtaatttgtgcatcgtctattctgcatccgcttcgtcgaataatgtatagcatcgctttgagattctccatagctatcaagtctttatacaatgacatggaaatatctgtgaatactttatacttctccaacatcgatgccttaacatcatcgcctactttagcattgaaaatacgttctattgtgtagatggatgtagcaagatttttaaacaacaatgccattttacacgatgattgcctcaagtctccaatcgtttgtttagaacgattagctacagagtccaatgcttggctgactagcatattattatctttagaaattgtattcttcaatgaggcgtttatcatatctgtgatttcgttagtcatattacagtctgactgggttgtaatgttatccaacatatcacctatggatacggtacacgtaccagcatttgtaataatcctatctaagatgttgtatggcattgcgcagaaaatatcttctcctgtaatatttccactctcgataaatctactcagattattcttaaatgccttattctctggagaaaagatatcagtgtccatcatttcattaatagtatacgcagaaaagataccacgagtatcaattctatccaagatacttatcggttccgagtcacagataatggtttcctctccttcgggagatcctgcatagaaatatctaggacaatagtttctatactgtctgtaactctgataatctctaaagtcactaactgataccatgaaattgagaagatcaaacgctgaagtaattaatttttctgcctcgtttttactacaactagttttcatcaatgtagtgacgatgtattgtttagttactcttggtctaatactgatgatagagatattattacttcccataatggatcttctagtagtcaccttaaagcccattgatgcaaatagcagatagataaagtcttggtatgactcctttctaatatagtacggactacctttgtcacccaactttatacccacataagccataacaacctctttaatagccgtttcatgaggtttatcagccatgagcctgagtagttggaagaatctcatgaatcctgtctcagaaagtcctatatgcatgatagatttatctttcctgggaaactctcgtatagtcatagatgaaatactcttcaaagtttctgaaataagattagtaacagtcttacctccgactactctaggtaacaaacaaactctaataggtgttttctctgcggagataatatcagaaaggatagagcaataagtagtattattgtgattataaagaccgaatacataacaggtagaatttataaacatcatgtcctgaaggtttttagacttgtattcctcgtaatccataccgtcccaaaacatggatttggtaactttgatagccgtagatctttgttccttcgccaacaggttaaagaaattaataaagaatttgtggtttctacctatgtctacaaattgcacgtttggaagcgccacggttacattcactgcagcattttgaggatcgcgagtatgaagtacgatgttattgtttactggtatatctggaaagaattctaccagtctaggaataagagattgatatcgcatagaaatacaaaagttcataatctcatcatctaagagcattttgttaccattgtaataaatatccactctgtcatatgtataaatgaagtactgttcaaacatgatgagatgtttatatgttggcatagtagtgagatctacgtttggtaatggcaatgtattaagattaactccataatgtctagcagcatctgcgatgttataagcgttgtcaaagcggggtcgatcttgtgctgttatatattgtctaacacctataagattatcaaaatcttgtctgcttaatacaccgttaacaatttttgccttgaattcttttattggtgcattaataacatccttatagaggatgttaaacaaataagtgttatcaaagttaagatctggatatttcttttctgctagaacatccattgagtcggagccatctggtttaatataaccaccgataaatctagctctgtattctgtatccgtcaatctaatattaagaaggtgttgagtgaaaggtggaagatcgtaaaagctgtgagtattaatgataggattagtttccgaactaatgttaattggggtattaataatatctatatttccagcgttaagtgtaacattaaacagttttaattcacgtgacgtggtatcaattaaataattaatgcccaatttggatatagcagcctgaagctcatcttgtttagttacggatcctaatgagttattaagcaatatatcgaacggatgaacgaaggttgttttaagttggtcacatactttgtaatctagacatagatgcggaagaacggtagaaactatacgaaataaatattcagagtcctctaattgatcaagagtaactattgacttaataggcatcatttatttagtattaaatgacgaccgtaccagtgacggatatacaaaacgatttaattacagagttttcagaagataattatccatctaacaaaaattatgaaataactcttcgtcaaatgtctattctaactcacgttaacaacgtggtagatagagaacataatgccgccgtagtgtcatctccagaggaaatatcctcacaacttaatgaagatctatttccagatgatgattctccggccactattatcgaacgagtacaacctcatactactattattgacgatactccacctcctacgtttcgtagagagttattgatatcggaacaacgtcaacaacgagaaaaaagatttaatattacagtatcgaaaaatgctgaagcaataatggaatctagatctatgatatcttctatgccaacacaaacaccatccttgggagtagtttatgataaagataaaagaattcagatgttggaggatgaagtggttaatcttagaaatcaacgatctaatacaaaatcatctgataatttagataattttaccagaatactatttggtaagactccgtataaatcaacagaagttaataagcgtatagccatcgttaattatgcaaatttgaacgggtctcccttatcagtcgaggacttggatgtttgttcagaggatgaaatagatagaatctataaaacgattaaacaatatcacgaaagtagaaaacgaaaaattatcgtcactaacgtgattattattgtcataaatattatcgagcaagcattgctaaaactcggatttgaagaaatcaaaggactgagtaccgatatcacttcagaaattatcgatgtggagatcggagatgactgcgatgctgtagcatcaaaactaggaatcggtaacagtccggttcttaatattgtattgtttatactcaagatattcgttaaacgaattaaaattatttaatttaatacattcccatatccagacaacaatcgtctggattaatctgttcctgtcgtctcataccggacgacatattaatctttttattagtaggcatctttttagatggtttctttttcccagcattaactgagtcgatacctagaagatcgtgattgatctctccgaccattccacgaacttctaattggccgtctctgacggtaccataaactattttaccagcattagtaacagcttggacaatctgaccatccatcgcattgtacgatgtagtagtaactgttgttctacgtctaggagcaccagaagtatttttggagcccttggatgttgatgtagaagaagacgaggattttgattttggtttacatgtaatacattttgtatcacatgcgccggcagtcacatctgtttgagaattaagattattgttgcctcctttgacggctgcatctccaccgatttgcgctagtagatttttaagctgtggtgtaatcttattaactgtttcgatataatcatcgtaactgcttctaacggctaaattttttttatccgccatttagaagctaaaaatatttttatttatgcagaagatttaactagattatacaatgaactaatatgatccttttccagattatttacaaacttggtattttttggttctggaggaggcgaatttaaattcggacttggatttggattttgtgggttcttgatcttattatacagcgcatataggatggcgacggtaactgctacgcaaataccgatcaacaaaagaataccaatcatttattgacaataacttcactattgatcaagtatgcaatatatcatcttttcactaaataagtagtaataatgattcaacaatgtcgagatatatggacgataataatttagttcatggaaatatcgctatgattggtatgaatgactccgctaactctgtggggcgcgcagtgctttccccacatagaataaattagcattccgactgtgataataataccaagtataaacgccataatactcaatactttccatgtacgagtgggactggtagacttactaaagtcaataaaggcgaagatacacgaaagaatcaaaagaatgattccagcgattagcacgccggaaaaataatttccaatcataagcatcatatccatttaactaataaaaattttaaatcgccgaatgaacaaagtggaatataaaccatataaaaacaatagtttgtactgcaaaaataatatctatttttgttttcgaagatatggtaaaattaaatagtagtacacagcatgttataactaacagcagcaacggctcgtaattacttatcatttactagacgaaaaggtggtgggatattttcttgctcaaataatacgaatatatcacccatccattttatgcgatgtttatatactctaatctttaatagatctatagacgacgggtttaccaacaatatagattttatcgattcatctaatttaaacccttccttaaacgtgaatgatctattatctggcataacgatgactctacccgatgaatcggacaatgtactgggccatgtagaataaattatcaacgaattatcgtctacgaacatttatatcatttgttttaattttagtacgcgaataaatagatataaaatagaaaataacagatattacaaccaatgttatggccgcgcccaaccaggtaggcagttttattttatcttttactacaggttctcctggatgtacgtcaccaacggcggacgtagttctagtacaattagacgtaagttccgcttgggaattttttaacgctaaagagttaacgttaatcgtgcacccaacgtatttacatctagttctttgaacatcttgattataatataaccattttctatctctagattcgtcggtgcactcatgtaaccaacataccctaggtcctaaatatttatctccggaattagattttggataattcgcgcaccaacaatttctatttcctttatgatcgttacaaaagacgtataatgccgtatccccaaaagtaaaataatcaggacgaataattctaataaactcagaacaatatctcgcatccatatgtttggagcaaatatcggaataagtagacatagccggtttccgttttgcacgtaaccattctaaacaattggggtttccaggatcgtttctacaaaatccagtcatgaaatcatcacaatgttctgtcttgtaattattattaaatatttttggacagtgtttggtatttgtcttagaacaacattttgccacgctatcactatcgcccaggagataatccttttttataaaatgacatcgttgcccggatgctatataatcagtagcgtgttttaaatccttaatatattcaggagttacctcgttctgataatagattaatgatccaggacgaaatttgaaagaactacatggttctccatgaattaatacatattgtttagcaaattcaggaactataaaactactacaatgatctatcgacataccatctatcaaacaaaacttgggtttaatttctcccggagatgtttcataatagtacgtataactttcttctgcaaacttaacagctctattatattcaggataattaaaacctaattccatatatttgtctcgtatatctgctattcctggtgctattttgattctattaagagtaacggctgcccccatttttaataatcgtcagtatttaaactgttaaatgttggtatatcaacatttaccttatttcccgcagtataaggtttgttgcaggtatactgttcaggaatggttacatttatactttttctatagtcctgtctttcgatgttcatcacatatgcaaagaacagaataaacaaaataatgtaagaaataatattaaatatctgtgaattcgtaaatacattgattgccataataattacagcagctacaatacatacaatagacattcccacagtgttgccattacctccacgatacatttgagttactaagcaataggtaataactaagctagtaagaggcaatagaaaagatgagataaatatcatcaatatagagattagaggagggctatatagagccaagacgaacaaaatcaaaccgagtaacgttctaacatcattatttttgaagattcccaaataatcattcattcctccataatcgttttgcatcatacctccatctttaggcataaacgattgctgctgttcctctgtaaataaatctttatcaagcactccagcacccgcagagaagtcgtcaagcatattgtaatatcttaaataactcatttatatattaaaaaatgtcactattaaagatggagtataatctttatgccgaactaaaaaaaatgacttgtggtcaacccctaagtctttttaacgaagacggggatttcgtagaagttgaaccgggatcatcctttaagtttctgatacctaagggattttacgcctctccttccgtaaagacgagtctagtatttgaaacattaacaacgaccgataataaaattactagtatcaatccaacaaatgcgccaaagttatatcctcttcaacgcaaagtcgtatctgaagtagtttctaatatgaggaaaatgatcgaatcaaaacgtcctctatacatcactcttcacttggcgtgtggatttggtaagactattaccacgtgttatcttatggctacacacggtagaaaaaccgtcatttgcgtacccaataaaatgttaatacatcaatggaagacacaggtagaggcagtcggattggaacataagatatccatagatggagtaagtagtctattaaaggaactaaagactcaaagtccggatgtattaatagtagtcagtagacatctgacaaacgatgccttttgtaaatatatcaataagcattatgatttgttcatcttggatgaatcacatacgtataatctgatgaacaatacagcagttacaagatttttagcgtattatcctccgatgatgtgttattttttaactgctacacctagaccatctaacagaatttattgtaacagtattattaatattgccaagttatccgatctaaaaaaaactatctatgcagtagatagtttttttgagccatattccacagataatattagacatatgataaaacgattagatggaccatctaataaatatcatatatataccgagaagttattatctgtagacgagcctagaaatcaacttattcttaataccctggtagaagaattcaagtcaggaactattaatcgcattttagttattactaaactacgtgaacatatggtattcttctacaaacgattattagattttttcggatcagaggttgtatttataggagacgcccaaaatagacgtactccagatatggtcaaatcaatcaaggaactaaatagatttatattcgtatccaccttattttattccggtactggtttagatattcctagtttggattctttgttcatttgctcggcagtaatcaacaatatgcaaatagagcaattactagggagggtatgtcgagaaacagaactattagataggacggtatatgtatttcctagcacatccatcaaagaaataaagtacatgataggaaatttcgttcaacgaattattagtctgtctgtagataaactaggatttaaacaaaaaagttatcggaaacatcaagaatccgatcccacttctgtatgtacaacatcctccagagaagaacgtgtattaaatagaatatttaactcgcaaaatcgttaagaagtttaagcgacgatccgcatgctgcgcaggccagtgtattacccctcatagtattaatataatccaatgatacttttgtgatgtcggaaatcttaaccaatttagactgacaggcagaacacgtcatgcaatcatcatcgtcatcgataactgtagtcttgggcttctttttgcggctcttcattccggaacgcacattggtgctatccatttaggtagtaaaaaataagtcagaatatgccctatagcacgatcgtgcaaaacctggtatatcgtctctatctttatcacaatatagtgtatcgacatctttattattattgacctcgtttatcttggaacatggaatgggaacatttttgttatcaacggccacctttgccttaattccagatgttgtaaaattataactaaacagtctatcatcgacacaaatgaaattcttgtttagacgtttgtagtttacgtatgcggctcgttcgcgtctcattttttcagatattgcaggtactataatattaaaaataagaatgaaataacataggattaaaaataaagttatcatgacttctagcgctgatttaactaacttaaaagaattacttagtctgtacaaaagtttgaaattttcagattctgcggctatagaaaagtataattctttggtagaatggggaacatctacttactggaaaataggcgtgcaaaaggtagctaatgtcgagacgtcaatatctgattattatgatgaggtaaaaaataaaccgtttaatattgatccgggctattacattttcttaccggtatattttgggagcgtctttatttattcgaagggtaaaaatatggtagaacttggatctggaaactcttttcaaataccagatgatatgcgaagtgcgtgtaacaaagtattagacagcgataacggaatagactttctgagatttgttttgttaaacaatagatggataatggaagatgctatatcaaaatatcagtctccagttaatatatttaaactagctagtgagtacggattaaacatacccaaatatttagaaattgaaatagaggaagacacattatttgacgacgagttatactctattatagaacgctctttcgatgataaatttccaaaaatatccatatcgtatattaagttgggagaacttaggcggcaagttgtagactttttcaaattctcattcatgtatattgagtccatcaaggtagatcgtataggagataatatttttattcctagcgttataacaaaatcaggaaaaaagatattagtaaaagatgtagaccatttaatacgatccaaggttagagaacatacatttgtaaaagtaaaaaagaaaaacacattttccattttatacgactatgatggaaacggaacagaaactagaggagaagtaataaaacgaattatagacactataggacgagactattatgttaacggaaagtatttctctaaggttggtagtgcaggcttaaagcaattgactaataaattagatattaatgagtgcgcaactgtcgatgagttagttgatgagattaataaatccggaactgtaaaacgaaaaataaaaaaccaatcagcatttgatttaagcagagaatgtttgggatatccagaagcggattttataacgttagttaataacatgcggttcaaaatagaaaattgtaaggttgtaaatttcaatattgaaaatactaattgtttaaataacccgagtattgagactatatatggaaactttaaccagttcgtctcaatctttaatatcgtcaccgatgtcaaaaaaagattattcgagtgaaataatatgcgcctttgatataggtgcaaaaaatcctgccagaactgttttagaagtcaaggataactccgttagggtattggatatatcaaaattagactggagttctgattgggaaaggcacatagctaaagatttgtcacaatatgaatacactacagttcttctagaacgtcagcctagaaggtcgccgtacgtcaaatttatctattttattaaaggctttttatatcatacatcggctgccaaagttatttgcgtctcgcctgtcatgtctggtaattcatatagagatcgaaaaaagagatcggtcgaagcatttcttgattggatggacacattcggattgcgagactccgttccggatagacgcaaattagacgatgtagcggatagtttcaatttggctatgagatacgtattagataaatggaatactaattatacaccttataataggtgtaaatctagaaattacataaaaaaaatgtaataacgttagtaacgccattatggataatctatttacctttctacatgaaatagaagatagatatgccagaactatttttaactttcatctaataagttgcgatgaaataggagatatatatggtcttatgaaagaacgcatttcctcagaggatatgtttgataatatagtgtataataaagatatacatcatgccattaagaaactagtgtattgcgacatccaacttactaaacacattattaatcagaatacgtatccggtatttaacgattcttcacaagtgaaatgttgtcattatttcgatataaactcagataatagcaatattagctctcgtacagtagagatatttgagagggaaaagtcatctcttgtatcatatattaaaactaccaataagaagagaaaggtcaattatggggaaataaagaaaactgtacatggaggcactaatgcaaattacttttccggtaaaaagtctgatgagtatctgagcactacagtcaggtccaacattaatcaaccttggatcaaaaccatttctaagagaatgagagtagatatcattaatcactctatagtaacgcgtggaaaaagctctatattacaaactatagaaattatttttactaatagaacatgtgtgaaaatattcaaggattctactatgcacattattctatccaaggacaaggatgaaaaggggtgtatacacatgattgacaaattattctatgtctattataatttatttctgttgttcgaggatatcatccaaaacgagtactttaaagaagtagctaatgttgtaaaccacgtactcacggctacggcattagatgagaaattattcctaattaagaaaatggctgaacacgatgtttatggagttagcaatttcaaaatagggatgtttaacctgacatttattaagtcgttggatcataccgttttcccctctctgttagatgaggatagcaaaataaagttttttaaggggaaaaagctcaatattgtagcattacgatctctggaggattgtataaattacgtgactaaatccgagaatatgatagaaatgatgaaggaaagatcgactattttaaatagcatagatatagaaacggaatcggtagatcgtctaaaagaattgcttctaaaatgaaaaaaaaacactaattcagaaatggatcaacgactcggatataagtttttggtgcctgatcctaaagccggagttttttatagaccgttacatttccaatatgtatcgtattctaattttatattgcatcgattgcatgaaatcttgaccgtcaagcggccactcttatcgtttaagaataatacagaacgaattatgatagaaattagcaatgttaaagtgactcctccagattactcacctataatcgcgagtattaaaggtaagagttatgacgcattagccacgttcactgtaaatatctttaaagaggtaatgaccaaagagggtatatccatcactaaaataagtagttatgagggaaaagattctcatttgataaaaattccgctactaataggatacgggaataaaaatccacttgatacagccaagtatcttgttcctaatgtcataggtggagtctttatcaataaacaatctgtcgaaaaagtaggaattaatctagtagaaaagattacaacatggccaaaatttagggttgttaagccaaactcattcactttctcgttttcctccgtatcccctcctaatgtattaccgacaagatatcgccattacaagatatctctggatatatcacaattggaagcgttgaatatatcatcgacaaagacatttataacggtcaatattgttttgctgtctcaatatttatctagagtgagtctagaattcattagacgtagtttatcatacgatatgcctccagaagttgtctatctagtaaacgcgataatagatagtgctaaacgaattactgaatctattactgactttaatattgatacatacattaatgacctggtggaagctgaacacattaaacaaaaatctcagttaacgatcaacgagttcaaatatgaaatgctgcataactttttacctcatatgaactatacacccgatcaactaaagggattttatatgatatctttactaagaaagtttctctactgtatctaccacacttctagatatccagatagagattcgatggtttgtcatcgcatcctaacgtacggcaaatattttgagacgttggcacatgatgaattagagaattacataggcaacatccgaaacgatatcatgaacaatcacaagaacagaggcacttacgcggtaaacattcatgtactaacaactcctggacttaatcatgcattttctagtctattgagtggaaagttcaaaaagtcagacggtagttatcgaacacatcctcactattcatggatgcagaatatttctattcctaggagtgttggattttatccggatcaagtaaagatttcaaagatgttttctgtcagaaaataccatccaagtcaatatctttacttttgttcatcggacgttccggaaagaggtcctcaggtaggtttagtatctcaattgtctgtcttgagttccattacaaatatactaacgtctgagtatttggatttggaaaagaaaatttgtgagtatatcagatcatattataaagatgatataagttactttgaaacaggatttccaatcactatagaaaatgctctagtcgcatctcttaatccaaatatgatatgtgattttgtaactgactttagacgtagaaaacggatgggattcttcggtaacttggaggtaggtattactttagttagggatcacatgaatgaaattcgcattaatattggagcgggaagattagtcagaccattcttggttgtggataacggagagctcatgatggatgtgtgtccggagttagaaagcagattagacgacatgacattctctgacattcagaaagagtttccgcatgtcatcgaaatggtagatatagaacaatttacttttagtaacgtatgtgaatcggttcaaaaatttagaatgatgtcaaaggatgaaagaaagcaatacgatttatgtgactttcctgccgaatttagagatggatatgtagcatcttcactagtgggaatcaatcacaattctggacccagagctattcttggatgtgctcaagctaaacaagctatctcttgtctgagctcggatatacgaaataaaatagacaatggaattcatttgatgtatccagagaggccaatcgtgattagtaaggctttagaaacttcaaagattgcggctaattgcttcggccaacatgttactatagcattaatgtcgtacaaaggtatcaatcaagaggatggaattatcatcaaaaaacaatttattcagagaggcggtctcgatattgttacagccaagaaacatcaagtagaaattccgttggaaaactttaataacaaagaaagagataggtctaacgcctattcaaaattagaaagtaatggattagttagactgaatgctttcttggaatccggagacgctatagcacgaaatatctcatcaagaactcttgaagatgattttgctagagataatcagattagctttgatgtttccgaaaaatataccgatatgtacaaatctcgcgttgaacgagtacaagtagaacttactgacaaagttaaggtacgagtattaaccatgaaagaaagaagacccattctaggagacaaatttaccactagaacgagtcaaaagggaacagtcgcgtatatcgcggatgaaacggaacttccatacgatgaaaatggtatcacaccagatgtcattattaattctacatccatcttctctagaaaaactatatctatgttgatagaggttattttaacagccgcatattctgctaagccgtacaacaataagggagaaaaccgacctgtctgttttcctagtagtaacgaaacatccatcgatacatatatgcaattcgctaaacaatgttatgagcattcaaatccgaaattgtctgatgaagaattatcggataaaatcttttgtgaaaagattctctatgatcctgaaacggataagccttatgcatccaaagtattttttggaccaatttattacttgcgtctgaggcatttaactcaggacaaggcaaccgttagatgtagaggtaaaaagacgaagctcattagacaggcgaatgagggacgaaaacgtggaggaggtatcaagttcggagaaatggagagagactgtttaatagcgcatggtgcagccaatactattacagaagttttgaaagattcggaagaagattatcaagatgtgtatgtttgtgaaaattgtggagacatagcagcacaaatcaagggtattaatacatgtcttagatgttcaaaacttaatctctctcctctcttaacaaaaattgataccacgcacgtatctaaagtatttcttactcaaatgaacgccagaggcgtaaaagttaaattagatttcgaacgaaggcctccttcgttttataaaccattagataaagttgatctcaaaccgtcttttctggtgtaatattctagtttggtagtagatacatatcaatatcatcaaattcgagatccgaattataaaatgggcgtggattgttaactatagaatcggacgtctgatattcgaaaatctgtggagttttaggttttggtggaggtgtaactgctacttgggatactgaagtctgatattcagaaagctgggggatgttctggttcgacatccaccgatggtgtcacatcactaatcggttcggtaacgtctgtggacgatggaggcaccacttctacaggttctggttctttatcctcagtcatcaacggagctacttcaatgcgaggaaatgtataatttggtaatggtttctcatgtggatctgaagaagaggtaagatatctactagaaagataccgatcacgttctagttctcttttgtagaacttaactttttctttctccgcatctagttgatattccaacctcttcacgttcgcatgggttacctccgcagtttttacgagcgatttcacgttcagccttcatgcgtcttatagcatgaattcgcttatcgttatcgggtttagcttctgtcaccttagcaattccttttttattaaactctacataatcatatccatttctattgtttgttctaatataaacgagtatagcatcattgctaaatttttcaatagtatcgaaaacagaatatcctaaaccatataatatatattcaggaacactcaaactaaatgtccaggattctcctaaatacgtaaactttaatagtgcgaaatcattcaaaaatctaccacttatagatagatagatagtacataaatgcgtatagtagtctacctatctctttattatgaaaaccggcattacgatcatatatgtcgtgatatacctgtgatccgtttacgttaaaccataaatacatgggtgatcctataaacatgaatttatttctaattctcagagctatagttaattgaccgtgtaatatttgcttacatgcatacttgatacgatcattaataagatttttatcattgctcgttatttcagaatcgtatatataaggagtaccatcgtgattcttaccagatattatacaaaatactatatataaaatatattgacccacgttagtaatcatgtaaatgtttaacgttttaaattttgtattcaatgatccattatcatacgctagcatggtcttatgatattcattctttaaaatataatattgtgttagccattgcattggggctcctaatggagattttttattctcatccattttaggataggctttcataaagtccctaataacttcgtgaataatgtttctatgttttctactgatgcatgtatttgcttcgatttttttatcccatgtttcatctatcatagatttaaacgcagtaatgctcgcaacattaacatcttgaaccgttggtacaattccgttccataaatttataatgttcgccatttatataactcattttttgaatatacttttaattaacaaaagagttaagttactcatatggacgccgtccagtctgaacatcaatctttttagccagagatatcatagccgctcttagagtttcagcgtgattttccaacctaaatagaacttcatcgttgcgtttacaacacttttctatttgttcaaactttgttgttacattagtaatctttttttccaaattagttagccgttgtttgagagtttcctcattgtcgtcttcatcggctttaacaattgcttcgcgtttagcctctggctttttagcagccgttgtagaaaaaaattcagttgctggaattgcaagatcgtcatctccggggaaaagagttccgtccatttaaagtacagattttagaaactgacactctgcgttatttatatttggtacaacacatggattataaatattgatgttaataacatcagaaaatgtaaagtctatacattgttgcatcgtgttaaattttctaatggatctagtattattgggtccaacttctgcctgaaatccaaatatggaagcggatacaaaaccgtttcctggataaaccacacatctccacttttgctttacatcagaaattgtgtcgttgacatcttgaactctcctatctaatgccggtgttccacctatagattttgaatattcgaatgctgcatgagtagcattaaattccttaatattgccataattttcatatattgagtaaccctggataaaaagtaaacacaccgcagccgtagctaccacaataaaaaaaattgatagagagttcatttataatctattagaagctgacaaaatttttttacacgcatcagacaatgctttaataaatagttcaacatctacttttgtcatatcgaaccgatggtatgattctaacctagaattacatccgaaaaagttgactatgttcatagtcattaagtcattaacaaacaacattccagactctggattataagacgatactgtttcgtcacaattacctaccttaatcatgtgattatgaatattggctattagagcaccttctaagaaatctataatatctttgaaacacgatttaaaatcaaaccacgaatatacttctacgaagaaagttagtttacccataggagaaataactataaatggagatctaaatacaaaatccggatctatgatagttttaacattattatattctctattaaatacctccacatctaaaaatgttaattttgaaactatgtcttcgtttattaccgtacctgaactaaacgctataagctctattgtttgagaactctttaaacgatattcttgaaatacatgtaacaaagtttcctttaactcggtcggtttatctaccatagttacagaatttgtatccttatctataatataataatcaaaatcgtataaagttatataattatcgcgttcagattgggatcttttcaaatagactaaaaaccccatttctctagtaagtatcttatgtatatgtttgtaaaatatcttcatggtgggaatatgctctaccgcagttagccattcctcattgacagcggtagatgtattagacaaaactattccaatgtttaacaagggccattttacgagattattaaatccttgtttgataaatgtagccaatgagggttcgagttcaacgacgattgaattctcttcccgcggatgctgcatgatgaacgacgggatgttgttcgattgatttggaattctttttcgactttttgtttatattaaatattttaaaatttatagcggatagcaattcatgtaccacggataatgtagacgcgtattgcgcatcgatatctttattattagataaatttatcaataaatgtgagaagtttgcctcgttaaggtcttccatttaaatattatataaacatttgtgtttgtatcttattcgtcttttatggaatagttttttactagtaaagctgcaattacacactttgtccgtaaaacataaatataaacaccagcttttatcaatcgttccaaaaagtcgacggcggacatttttaacatggcatctattttaaatacacttaggtttttggaaaaaacatcattttataattgtaacgattcaataactaaagaaaagattaagattaaacataagggaatgtcatttgtattttataagccaaagcattctaccgttgttaaatacttgtctggaggaggtatatatcatgatgatttggttgtattggggaaggtaacaattaatgatctaaagatgatgctattttacatggatttatcatatcatggagtgacaagtagtggaacaatttacaaattgggatcgtctatcgatagactttctctaaataggactattgttacaaaagttaataattataattatgatacattttttgacgatgatgattgatcgctattgcacaattttgtttttttactttctaatatagcgtttagattctttttcatgtgcgaatattgatttactaaaatatctatgtttaacttttgttctataacgtccttatcggcggtatcggtacatatacgtaattcaccttcacaaaatacggagtcttcgataataatagccaatcgattattggatctagctgtctgtatcatattcaacatgtttaatatatcctttcgtttcccctttacaggcatcgatcgtagcatattttccgcgtctgagatggaaatgttaaaactacaaaaatgcgtaatgttagcccgtcctaatattggtacgtgtctataagtttggcatagtagaataatagacgtgtttaaatgccttccaaagtttaagaattctattagagtattgcattttgatagtttatcgcctacatcatcaaaaataagtaaaaagtgtgctgattttttatgattttgtgcgacagcaatacatttttctatgttacttttagttcgtatcagattatattctagagattcctgactactaacgaaattaatatgatttggccaaatgtatccatcataatctggattataaacgggtgtaaacaagaatacatgtttatattttttaactagtgtagaaaacagagatagtaaatagatagtttttccagatccagatcctcccgttaaaaccattctaaacggcatttttaataaattttctcttgaaaattgtttttcttggaaacaattcataattatatttacagttactaaattaatttgataataaatcaaaatatggaaaactaaggtcgttagtagggaggagaacaaagaaggcacatcgtgacataaataacatttattatcatgatgacaccagaaaacgacgaagagcagacatctgtgttctccgctactgtttacagagacaaaattcagggaaagaataaacgcaaacgcgtgattggtctatgtattagaatatctatggttatttcactactatctatgattaccatgtccgcgtttctcatagtgcgcctaaatcaatgcatgtctgctaacgaggctgctattactgacgccgctgttgccgttgctgctgcatcatctactcatagaaaggttgcgtctagcactacgcaatatgatcacaaagaaagctgtaatggtttatattaccagggttcttgttatatattacattcagactaccagttattctcggatgctaaagcaaattgcactgcggaatcatcaacactacccaataaatccgatgtcttgactacctggctcattgattatgttaaggatacatggggatctgatggtaatccaattacaaaaactacatccgattatcaagattctgatgtatcacaagaagttagaaagtatttttgtgttaaaacaatgaactaatatttatttttgtacattaataaatgaaatcgcttaatagacaaactgtaagtaggtttaagaagttgtcggtgccggtcgctataatgatgatactctcaaccattattagtggcataggaacatttctgcattacaaagaagaactgatgcctagtgcttgcgccaatggatggatacaatacgataaacattgttatttagatactaacattaaaatgtctacagataatgcggtttatcagtgtcgtaaattacgagccagattgcctagaccggatactagacatctgagagtattgtttagtattttttataaagattattgggtaagtttaaaaaagaccaatgataaatggttagatattaataatgataaagatatagatattagtaaattaacaaattttaaacaactaaacagtacgacggatgctgaagcgtgttatatatacaagtctggaaaactggttaaaacagtatgtaaaagtactcaatctgtactatgtgttaaaaaattctacaagtgacaacaaaaaatgaattaataataagtcgttaacgtacgccgccatggacgccgcgtttgttattactccaatgggtgtgttgactataacagatacattgtatgatgatctcgatatctcaatcatggactttataggaccatacattataggtaacataaaaactgtccaaatagatgtacgggatataaaatattccgacatgcaaaaatgctactttagctataagggtaaaatagttcctcaggattctaatgatttggctagattcaacatttatagcatttgtgccgcatacagatcaaaaaataccatcatcatagcatgcgactatgatatcatgttagatatagaagataaacatcagccattttatctattcccatctattgatgtttttaacgctacaatcatagaagcgtataacctgtatacagctggagattatcatctaatcatcaatccttcagataatctgaaaatgaaattgtcgtttaattcttcattctgcatatcagacggcaatggatggatcataattgatgggaaatgcaatagtaattttttatcataaaagttgtaaagtaaataataaaacaataaatattgaactagtagtacgtatattgagcaatcagaaatgatgctggtacctcttatcacggtgaccgtagttgcgggaacaatattagtatgttatatattatatatttgtaggaaaaagatacgtactgtctataatgacaataaaattatcatgacaaaattaaaaaagataaagagttctaattccagcaaatctagtaaatcaactgatagcgaatcagactgggaggatcactgtagtgctatggaacaaaacaatgacgtagataatatttctaggaatgagatattggacgatgatagcttcgctggtagtttaatatgggataacgaatccaatgttatggcgcctagcacagaacacatttacgatagtgttgctggaagcacgctgctaataaataatgatcgtaatgaacagactatttatcagaacactacagtagtacttaatgaagataccaaacagaatcctaactattcatccaatcctttcgtaaattataataaaaccagtatttgtagcaagtcaaatccgttcattacagaactcaacaataaatttagtgagaataatccgtttagacgagcacatagcgatgattatcttaataagcaagaacaagatcatgaacacgatgatatagaatcattggtgtgattagtttcctttttataaaattgaagtaatatttagtattattgctgccgtcacgttgtacaaatggagatattccctgtattcggcatttctaaaattagcaattttattgctaataatgactgtagatattatatagatacagaacatcaaaaaattatatctgatgagatcaatagacagatggatgaaacggtacttcttaccaacatcttaagcgtagaagttgtaaatgacaatgagatgtaccatcttattcctcatagattatcgacgattatactctgtattagttctgtcggaggatgtgttatctctatagataatgacgtcaatggcaaaaatattctaacctttcccattgatcatgctgtaatcatatccccactgagtaaatgtgtcgtagttagcaagggtcctacaaccatattggttgttaaagcggatatacctagcaaacgattggtaacatcgtttacaaacgacatactgtatgtaaacaatctatcactgattaattattcgccgttgtctgtattcattattagacgagttaccgactatttggatagacacatatgcgatcagatatttgcgaataataagtggtattccattataaccatcgacaataagcagtttcctattccatcaaactgtataggtatgtcctctgccaagtacataaattctagcatcgagcaagatactttaatacatgtttgtaacctcgagcatccattcgacttagtatacaaaaaaatgcagtcgtacaattctgtacctatcaaggaacaaatattgtacggtagaattgataatataaatatgagcattagtatttctgtggattaatagatttctagtatggggatcattaatcatctctaatctctaaatacctcataaaacgaaaaaaaagctattatcaaatactgtacggaatggattcattctcttctctttttatgaaactctgttgtatatctactgataaaactggaagcaaaaaatctgataaaaagaataagaataagatcaaggattattataaaataacaatagttcctggttcctcttccacgtctactagctcgtggtattatacacatgcctagtaatagtctctttgcgttgacggaaagcagactagaaataacaggctaaaatgttcagacaccataatagttcccaacccagataataacagagtaccatcaacacattcctttaaactcaatcccaaacccaaaaccgttaaaatgtatccggccaattgatagtagataatgaggtgtacagcgcatgatgatttacacagtaaccaaaatgaaaatactttagtaattataagaaatatagatggtaacgtcatcatcaacaatccaataatatgccggagagtaaacattgacggataaaacaaaaatgctccgcataactctatcatggcaataacacaaccaaatacttgtaagattcctaaattagtagaaaatacaacggatatcgatgtataagtgatctcgagaaataataagaataaagtaatgcccgtaaagataaacatcaacattgtttggtaatcattaaaccaattagtatgaagttgaactaatttcacagtagattttattccagtattatccccgcatgtataagtacctggtaagatatctttatattccataatcaatgagacatcactatctgataacgaatgaagtctagcactagtatgccatttacttaatattgtcgtcttggaagttttattataagttaaaatatcatggttatccaatttccatctaatatactttgtcggattatctatagtacacggaataatgatggtatcattacatgctgtatactctatggtctttgtagttgttataacaaccaacgtatagaggtatatcaacgatattctaactcttgacattttttatttatttaaaatgatacctttgttatttattttattctattttgctaacggtattgaatggcataagtttgaaacgagtgaagaaataatttctacttacttattagacgacgtattatacacgggtgttaatggggcggtatacacattttcaaataataaactaaacaaaactggtttaactaataataattatataacaacatctataaaagtagaggatgcggaaccaataacggaaatcccaaatgttggaaaatagacggttcagacgacccaaaacatagaggtagaggatacgctccttatcaaaatagcaaagtaacgataatcagtcacaacggatgtgtactatctgacataaacatatcaaaagaaggaattaaacgatggagaagatttgacggaccatgtggttatgatttatacacggcggataacgtaattccaaaagatggtttacgaggagcattcgtcgataaagatggtacttatgacaaagtttacattcttttcactgatactatcggctcaaagagaattgtcaaaattccgtatatagcacaaatgtgcctaaacgacgaaggtggtccatcatcattgtctagtcatagatggtcgacgtttctcaaagtcgaattagaatgtgatatcgacggaagaagttatagacaaattattcattctagaactataaaaacagataatgatacgatactatatgtattcttcgatagtccttattccaagtccgcattatgtacctattctatgaataccattaaacaatctttttctacgtcaaaattggaaggatatacaaagcaattgccgtctccagctcctggtatatgtttaccagctggaaaagttgttccacataccacgtttgaagtcatagaaaaatataatgtactagatgatattataaagcctttatctaaccaacctatcttcgaaggaccgtctggtgttaaatggttcgatataaaggagaaggaaaatgaacatcgggaatatagaatatacttcataaaagaaaattctatatattcgttcgatacaaaatctaaacaaactcgtagctcgcaagtcgatgcgcgactattttcagtaatggtaacttcgaaaccgttatttatagcagatatagggataggagtaggaatgccacaaatgaaaaaaatacttaaaatgtaatcttaatcgagtacaccgcacgacaatgaacaaacataagacagattatgctggttatgcttgctgcgtaatatgcggtctaattgttggaattatttttacagcgacactattaaaagttgtagaacgtaaattagttcatacaccatcaatagataaaacgataaaagatgcatatattagagaagattgtcctactgactggataagctataataataaatgtatccatttatctactgatcgaaaaacctgggaggaaggacgtaatgcatgcaaagctctaaatccaaattcggatctaattaagatagagactccaaacgagttaagttttttaagaagcattagacgcggatattgggtaggagaatccgaaatattaaaccagacaaccccatataattttatagctaaaaatgccacgaagaatggaactaaaaaacggaaatatatttgtagtacaacgaatactcccaaactacatttttatcataccactacttcggttagatgttttagaaaaaaataaatatcgccgtaccgttcttgtttttataaaaataacaattaacaattatcaaattttttctttaatattttacgtggttgaccattcttggtggtaaaataatctcttagtgttggaatggaatgctgtttaatgtttccgcactcatcgtatattttgacgtatgcagtcacatcgtttacgcaatagtcagactgtagttctatcatgcttcctacatcagaaggaggaacagttttaaagtctcttggttttaatctattgccattagttttcatgaaatcctttgttttatccacttcacattttaaataaatgtccactatacattcttctgttaattttactagatcgtcatgggtcatagaatttataggttccgtagtccatggatccaaactagcaaacttcgcgtatacggtatcgcgattagtgtatacaccaactgtatgaaaattaagaaaacagtttaataaatcaacagaaatatttaatcctccgtttgatacagatgcgccatatttatggatttcggattcacacgttgtttgtctgaggtgttcgtctagtgttgcttctacgtaaacttcgattcccatatattctttattgtcagaatcgcataccgatttatcatcatacactgtttgaaaactaaatggtatacacatcaaaataataaataataacgagtacattctgcaatattgttatcgtaattggaaaaatagtgttcgagtgagttggattatgtgagtattggattgtatattttattttatattttatattttgtagtaagaatagaatgctaatgtcaagtttattccaatagatgtcttattaaaaaacatatataataaataacaatggctgaatggcataaaattatcgaggatatctcaaaaaataataagttcgaggatgccgccatcgttgattacaagactacaaagaatgttctagctgctattcctaacagaacatttgccaagattaatcctctcatcactaatcgtaatattctaaaacctcttattggtcagaaatattgtattgtatatactaactctctaatggatgagaacacgtatgctatggagttgcttactgggtacgcccctgtatctccgatcgttatagcgagaactcataccgcacttatatttttgatgggtaagccaacaacatccagacgtgacgtgtatagaacgtgtagagatcacgctacccgtgtacgtgcaactggtaattaaaataaaaagtaatattcatatgtagtgtcaattttaaatgatgatgatgaaatggataatatccatattgacgatgtcaataatgccggtattggcatacagttcatcgatttttagatttcattcagaggatgtggaattatgttatgggcatttgtattttgataggatctataatgtagtaaatataaaatataatccgcatattccatatagatataattttattaatcgcacgttaaccgtagatgaactagacgataatgtcttttttacacatggttattttttaaaacacaaatatggttcacttaatcctagtttgattgtctcattatcaggaaacttaaaatataatgatatacaatgctcagtaaatgtatcgtgtctcattaaaaatttggcaacgagtacatctactatattaacatctaaacataagacttattctctacatcggtccacgtgtattactataataggatacgattctattatatggtataaagatataaatgacatctatgattttactgcaatatgtatgctaatagcgtctacattgatagtgaccatatacgtgtttaaaaaaataaaaatgaactcttaattatgctatgctattagaaatggataaaatcaaaattacggttgattcaaaaattggtaatgttgttaccatatcgtataacttggaaaagataactattgatgtcacacctaaaaagaaaaaagaaaaggatgtattattagcgcaatcagttgctgtcgaagaggcaaaagatgtcaaggtagaagaaaaaaatattatcgatattgaagatgacgatgatatggatgtagaaagcgcataatacgatctataaaaataagtatataaatactttttatttactgtactcttactgtgtagtggtgataccctactcgattatttttttaaaaaaaaatacttattctgattcttctagccatttccgtgttcgttcgaatgccacatcgacgttaaagataggggagtagttgaaatctagttctgcattgttggtacgcacctcaaatgtagtgttggatatcttcaacgtatagttgttgagtagtgatggttttctaaatagaattctcttcatatcattcttgcacgcgtacatttttagcatccatcttggaatcctagatccttgttctattcccaatggtttcatcaatagaagattaaacatatcgtacgaacacgatggagagtaatcgtagcaaaagtaagcatttcctttaatctcagatcccggatactggatatattttgcagccaacacgtgcatccatgcagcatttcctacatatacccggctatgtaccgcgttatcatcgactgtacgatacataatgttaccgtgttgcttacattgctcgtaaaagactttcatcaatttgtctccttctccgtaaattccagtgggtcttaggcaacaagtatacaattttgctccattcatgattacggaattattggctttcataaccagttgctcggccatacgtttactttttgcgtatacatgtcctggtgatatatcataaagggtatgctcatggccgatgaatggatcaccgtgtttattgggtcctattgcttccatgctactagtatagatcaaatacttgattcctaggtccacacaagctgccaatatagtctgtgttccataatagtttactttcatgatttcattatcggtgtattttccaaatacatccactagagcagctgtatgaataatcagatttaccccatctagcgcttctcttaccttatcaaagtcgtttatatcacattgtatatagtttataaccttaactttcgaggttattggttgtggatcttctacaatatctatgactctgatttcttgaacatcatctgcactaattaacagttttactatatacctgcctagaaatccggcaccaccagtaaccgcgtacacggccattgctgccactcataatatcagactacttattctattttactaaataatggctgtttgtataatagaccacgataatatcagaggagttatttactttgaaccagtccatggaaaagataaagttattggattaaaatccggaacgtatagtttgataattcatcgttacggagatattagtcaaggatgtgattccataggcagtccagaaatatttatcggtaacatctttgtaaacagatatggtgtagcatatgtttatttagatacagatgtaaatatatctacaattattggaaaggcgttatctatttcaaaaaatgatcagagattagcgtgtggagttattggtatttcttacataaatgaaaagataatacattttcttacaattaacgagaatggcgtttgatatatcagttaatgcgtctaaaacaataaatgcattagtttacttttctactcagcaaaataaattagtcatacgtaatgaagttaatgatacacactacactgtcgaatttgatagggacaaagtagttgacacgtttatttcatataatagacataatgactccatagagataagaggggtgcttccagaggaaactaatattggttgcgcggttaatacgccggttagtatgacttacttgtataataagtatagttttaaactgattttagcagaatatataagacacagaaatactatatccggcaatatttattcggcattgatgacactagatgatttggctattaaacagtatggagacattgatctattatttaatgagaaacttaaagtagactccgattcgggactatttgactttgtcaactttgtaaaggatatgatatgttgtgattctagaatagtagtagctctatctagtctagtatctaaacattgggaattgacaaataaaaaatataggtgtatggcattagccgaacatatatctgatagtattccaatatctgagctatctagactacgatacaatctatgtaagtatctacgcgggcacactgagagcatagaggatgaatttgattattttgaagacgatgattcgtctacatgttctgccgtaaccgacagggaaacggatgtataattttttttatagcgtgaaggatatgataaaaaatataattgttgtatttatcccattccaatcaccttatatgattctgtaacacaatgaaggagtcttatagatgtatagaggtcagatactggtttgataaactgtttattccacataagtatgtttgactttatggttagacccgcatactttaacaaatcactgaaaattggagttaggtattgacctctcagaatcagttgccgttctggaacattaaatgtattttttatgatatactccaacgcatttatgtgggcatacaacaagtcattactaatggagtattccaagagaagagatttcaacagactgtttatgaactcgaatgccgcctcattgtcgcttatattgatgatgtcgaattctcccaatatcatcaccgatgagtagctcatcttgttatcgggatccaagttttctaaagatgtcattaaaccctcgatcatgaatggatttatcatcatcgtttttatgttggacatgagcttagtccgtttgtccacatctatagacgacgatttctgaattatttcatatatccctctctttaactccaggaacttgtcaggatggtctactttaatatgttctcgtctaagagatgaaaatctttggatggttgcacgcgacttttctctaaaggatcctctcttaaatgaatccatcttatccttggacaagatggacagtctattttccttagatggtttaatatttttgttacccatgatctataaaggtagacctaatcgtctcggatgaccatatatttattttcagttttattatacgcataaattgtaaaaaatatgttaggtttacaaaaatgtctcgtggggcattaatcgtttttgaaggattggacaaatctggaaaaacaacacaatgtatgaacatcatggaatctataccggcaaacacgataaaatatcttaactttcctcagagatccactgtcactggaaagatgatagatgactatctaactcgtaaaaaaacctataatgatcatatagttaatctattattttgtgcaaatagatgggagtttgcatcttttatacaagaacaactagaacagggaattactttaatagttgatagatacgcattctctggagtagcgtatgccgccgctaaaggcgcgtcaatgactctcagtaagagttatgaatctggattgcctaaacccgacttagttatattcttggaatctggtagcaaagaaattaatagaaacgtcggcgaggaaatttatgaagatgttacattccaacaaaaggtattacaagaatataaaaaaatgattgaagaaggagatattcattggcaaattatttcttctgaattcgaggaagatgtaaagaaggagttgattaagaatatagttatagaggctatacacacggttactggaccagtggggcaactgtggatgtaatagtgaaattacattttttataaatggatgaagcatattactctggcaacttggaatcagtactcggatacgtgtccgatatgcataccgaactcgcatcaatatctcaattagttattgccaagatagaaactatagataatgatatattaaacaaggacattgtaaattttatcatgtgtagatcaaacttggataatccatttatctctttcctagatactgtatatactattatagatcaagagatctatcagaccgaattgattaattcattagacgacaatgaaattatcgattgtatagttaacaagtttatgagcttttataaggataacctagaaaatatagtagatgctatcattactctaaaatatataatgaataatccagattttaaaactacgtatgccgaagtactcggttccagaatagcggatatagatattaaacaagtgatacgtgagaatatactacaattgtctaataatatccgcgaacgatatttgtgaaaatattaaaaaaaaatactttttttattaaatgacgtcgcttcgcgaatttagaaaattatgctgtgatatatatcacgcatcaggatataaagaaaaatctaaattaattagagactttataacagatagggatgataaatatttgatcattaagctattgcttcccggattagacgatagaatttataacatgaacgataaacaaattataaaattatatagtataatatttaaacaatctcaggaagatatgctacaagatttaggatacggatatataggagacactattaggactttcttcaaagagaacacagaaatccgtccacgagataaaagcattttaactttagaagaagtggatagttttttaactacgttatcatccgtaactaaagaatcgcatcaaataaaattattgactgatatcgcatccgtttgtacatgtaatgatttaaaatgtgtagtcatgcttattgataaagatctaaaaattaaagcgggccctcggtacgtacttaacgctattagtcctcatgcctatgatgtgtttagaaaatctaataacttgaaagagataatagaaaatgcatctaaacaaaatctagactctatatctatttctgttatgactccaattaatcccatgttagcggaatcgtgtgattctgtcaataaggcgtttaaaaaatttccatcaggaatgtttgcggaagtcaaatacgatggtgaaagagtacaagttcataaaaataataacgagtttgccttctttagtagaaacatgaaaccagtactctctcataaagtggattatctcaaagaatacataccgaaagcatttaaaaaagctacgtctatcgtattggattctgaaattgttcttgtagacgaacataatgtaccgctcccgtttggaagtttaggtatacacaaaaagaaagaatataaaaactctaacatgtgtttgttcgtgtttgactgtttgtactttgatggattcgatatgacggacattccattgtacgaacgaagatcttttctcaaagatgttatggttgaaatacccaatagaatagtattctcagagttgacgaatattagtaacgagtctcagttaactgacgtattggatgatgcactaacgagaaaattagaaggattggtcttaaaagatattaatggagtatacgaaccgggaaagagaagatggttaaaaataaagcgagactatttgaacgagggttccatggcagattctgccgatttagtagtactaggtgcttactatggtaaaggagcaaagggtggtatcatggcagtctttctaatgggttgttacgacgatgaatccggtaaatggaagacggttaccaagtgttcaggacacgatgataatacgttaagggagttgcaagaccaattaaagatgattaaaattaacaaggatcccaaaaaaattccagagtggttagtagttaataaaatctatattcccgattttgtagtagaggatccaaaacaatctcagatatgggaaatttcaggagcagagtttacatcttccaagtcccataccgcaaatggaatatccattagatttcctagatttactaggataagagaggataaaacgtggaaagaatctactcatctaaacgatttagtaaacttgactaaatcttaatagttacatacaaattaaaataacactatttagttggtggtcgccatggatggtgttattgtatactgtctaaacgcgttagtaaaacatggcgaggaaataaatcatataaaaaatgatttcatgattaaaccatgttgtgaaaaagtcaagaacgttcacattggcggacaatctaaaaacaatacagtgattgcagatttgccatatatggataatgcggtatccgatgtatgcaattcactgtataaaaagaatgtatcaagaatatccagatttgctaatttgataaagatagatgacgatgacaagactcctactggtgtatataattattttaaacctaaagatgccattcctgttattatatccataggaaaggatagagatgtttgtgaactattaatctcatctgataaagcgtgtgcgtgtatagagttaaattcatataaagtagccattcttcccatggatgtttccttttttaccaaaggaaatgcatcattgattattctcctgtttgatttctctatcgatgcggcacctctcttaagaagtgtaaccgataataatgttattatatctagacaccagcgtctacatgacgagcttccgagttccaattggttcaagttttacataagtataaagtccgactattgttctatattatatatggttgttgatggatctgtgatgcatgcaatagctgataatagaacttacgcaaatattagcaaaaatatattagacaatactacaattaacgatgagtgtagatgctgttattttgaaccacagattaggattcttgatagagatgagatgctcaatggatcatcgtgtgatatgaacagacattgtattatgatgaatttacctgatgtaggcgaatttggatctagtatgttggggaaatatgaacctgacatgattaagattgctctttcggtggctggtaaaaaattgaaaataaatacaaaggttcttgagggttgtgttaaattgaaagcgagaaataatcataaataagataaacgccgccaccatgtttgtctttcttgtcttattgccactagtctctagtcagtgtgttaatcttacaaccagaactcaattaccacctgcatacactaattctttcacacgtggtgtttattaccctgacaaagtattcagatcctcagtattacattcaactcaggacttgttcttacctttcttctccaatgttacttggttccatgctatacatgtctctgggaccaatggtactaagaggtttgataaccctgtcctaccatttaatgatggtgtttatttcgcttccactgagaagtctaacataataagaggctggatatttggtactactttagattcgaagacccagtccctacttattgttaataacgctactaatgttgttattaaagtctgtgaatttcaattctgtaatgatccattcttgggtgtttattaccacaagaacaacaagagttggatggaaagtgagttcagagtttattctagtgcgaataattgcactttcgaatatgtctctcagcctttccttatggaccttgaaggtaaacagggtaatttcaagaatcttagggaatttgtgtttaagaatattgatggttatttcaagatatattctaagcacacgcctattaatttagtgcgtgatctccctcagggtttctcggctttagaaccattggtagatttgccaataggtattaacatcactaggtttcaaactttacttgctttacatagaagttatttgactcctggtgattcttcttcaggttggacagctggtgctgcagcttattatgtgggttatcttcaacctaggactttcctattgaaatataatgagaatggaaccattacagatgctgtagactgtgcacttgaccctctctcagaaacaaagtgtacgttgaaatccttcactgtagagaaaggaatctatcaaacttctaactttagagtccaaccaacagaatctattgttagatttcctaatattacaaacttgtgccctttcggtgaagtatttaacgccaccagatttgcatctgtttatgcttggaacaggaagagaatcagcaactgtgttgctgattattctgtcctatataattccgcatcattctccacatttaagtgttatggagtgtctcctactaaattaaatgatctctgctttactaatgtctatgcagattcatttgtaattagaggtgatgaagtcagacaaatcgctccagggcaaactggaaagattgctgattataattataaattaccagatgactttacaggctgcgttatagcttggaattctaacaatcttgattctaaggttggtggtaattataattacctgtatagattgtttaggaagtctaatctcaaacctttcgagagagatatttcaactgaaatctatcaggccggtagcacaccttgtaatggtgttgaaggatttaattgttactttcctttacaatcatatggtttccaacccactaatggtgttggttaccaaccatacagagtagtagtactttcatttgaacttctacatgcaccagcaactgtttgtggacctaagaagtctactaatttggttaagaacaaatgtgtcaatttcaacttcaatggtttaacaggcacaggtgttcttactgagtctaacaagaagtttctgcctttccaacaatttggcagagacattgctgacactactgatgctgtccgtgatccacagacacttgagattcttgacattacaccatgttcatttggtggtgtcagtgttataacaccaggaacaaatacttctaaccaggttgctgttctttatcaggatgttaactgcacagaagtccctgttgctattcatgcagatcaacttactcctacttggcgtgtttattctacaggttctaatgtatttcaaacacgtgcaggctgtttaataggagctgaacatgtcaacaactcatatgagtgtgacatacccattggtgcaggtatatgcgctagttatcagactcagactaattctcctcggcgggcacgtagtgtagctagtcaatccatcattgcctacactatgtcacttggtgcagagaattcagttgcttactctaataactctattgccatacccacaaactttactattagtgttaccacagaaattctaccagtgtctatgaccaagacatcagtagattgtacaatgtacatttgtggtgattcaactgaatgcagcaatctattgttgcaatatggcagtttctgtacacaattaaaccgtgctttaactggaatagctgttgaacaagacaagaacacccaagaagtatttgcacaagtcaaacaaatttacaagacaccaccaattaaagatttcggtggatttaatttctcacaaatattaccagatccatctaaaccaagcaagaggtcatttattgaagatctactattcaacaaagtgacacttgcagatgctggcttcatcaaacaatatggtgattgccttggtgatattgctgctagagacctcatttgtgcacagaagtttaacggccttactgtattgccacctttgctcacagatgaaatgattgctcaatacacttctgcactgttagcgggtacaatcacttctggttggacctttggtgcaggtgctgcattacaaataccatttgctatgcaaatggcttataggtttaatggtattggagttacacagaatgttctctatgagaaccagaaattgattgccaaccaatttaatagtgctattggcaagattcaagactcactttcttccacagcaagtgcacttggtaaacttcaagatgtggtcaaccagaatgcacaagctttaaacacgcttgttaaacaacttagctccaactttggtgcaatttcaagtgtattaaatgatatcctttcacgtcttgacaaagttgaggctgaagtgcaaattgataggttgatcacaggcagacttcaaagtttgcagacatatgtgactcaacaattaattagagctgcagaaatcagagcttctgctaatcttgctgctactaagatgtcagagtgtgtacttggacaatctaagagagttgatttctgtggaaagggctatcatcttatgtccttccctcagtcagcacctcatggtgtagtcttcttgcatgtgacttatgtccctgcacaagagaagaacttcacaactgctcctgccatttgtcatgatggtaaagcacactttcctcgtgaaggtgtctttgtttcaaatggcacacactggtttgtaacacaaaggaatttctatgaaccacaaatcattactacagacaacacatttgtgtctggtaactgtgatgttgtaataggaattgtcaacaacacagtttatgatcctttgcaacctgaattagactcattcaaggaggagttagataaatatttcaagaatcatacatcaccagatgttgatttaggtgacatctctggcattaatgcttcagttgtaaacattcagaaagaaattgaccgcctcaatgaggttgccaagaatttaaatgaatctctcatcgatctccaagaacttggaaagtatgagcagtatatcaaatggccatggtacatttggctaggtttcatagctggcttgattgccatagtaatggtgacaattatgctttgctgtatgaccagttgctgtagttgtctcaagggctgttgttcttgtggatcctgctgcaaatttgatgaagacgactctgagccagtgctcaaaggagtcaaattacattacacataaggcgcgcctttttatactagtatttggaaagttttataggtagttgatagaacaaaatacataattttgtaaaaataaatcactttttatactaatatgacacgattaccaatacttttgttactaatatcattagtatacgctacaccttttcctcagacatctaaaaaaataggtgatgatgcaactttatcatgtaatcgaaataatacaaatgactacgttgttatgagtgcttggtataaggagcccaattccattattcttttagctgctaaaagcgacgtcttgtattttgataattataccaaggataaaatatcttacgactctccatacgatgatctagttacaactatcacaattaaatcattgactgctagagatgccggtacttatgtatgtgcattctttatgacatcgcctacaaatgacactgataaagtagattatgaagaatactccacagagttgattgtaaatacagatagtgaatcgactatagacataatactatctggatctacacattcaccggaaactagttctgagaaacctgattatatagataattctaattgctcgtcggtattcgaaatcgcgactccggaaccaattactgataatgtagaagatcatacagacaccgtcacatacactagtgatagcattaatacagtaagtgcatcatctggagaatccacaacagacgagactccggaaccaattactgataaagaagaagatcatacagttacagacactgtctcatacactacagtaagtacatcatctggaattgtcactactaaatcaaccaccgatgatgcggatctttatgatacgtacaatgataatgatacagtaccatcaactactgtaggcggtagtacaacctctattagcaattataaaaccaaggactttgtagaaatatttggtattaccgcattaattatattgtcggccgtggcaatattctgtattacatattatatatataataaacgttcacgtaaatacaaaacagagaacaaagtctagatttttgacttacataaatgtctgggatagtaaaatctatcatattgagcgggccatctggtttaggaaagacagccatagccaaaagactatgggaatatatttggatttgtggtgtcccataccactagatttcctcgtcctatggaacgagaaggtgtcgattaccattacgttaacagagaggccatctggaagggaatagccgccggaacatactgagtttttaggaaatatttacggaacttctaaaactgctgtgaatacagcggctattaataatcgtatttgtgtgatggatctaaacatcgacggtgttagaagttttaaaaatacttacctaatgccttactcggtgtatataagacctacctctcttaaaatggttgagaccaagcttcgttgtagaaacactgaagcggatgatgagattcatcgtcgtgtgatgttggcaaaaactgacatggatgaggcaggtgaagccggtctattcgacactattatcattgaagatgatgtgaatttagcatatagtaagttaattcagatactacaggaccgtattagaatgtattttaacactaattagagacttaagacttaaaacttgataattaataatataactcgtttttatatgtggctatttcaacgtctaatgtattagttaaatattaaaacttaccacgtaaaacttaaaatttaaaatgatatttcattgacagatagatcacacattatgaactttcaaggacttgtgttaactgacaattgcaaaaatcaatgggtcgttggaccattaataggaaaaggtggatttggtagtatttatactactaatgacaataattatgtagtaaaaatagagcccaaagctaacggatcattatttaccgaacaggcattttatactagagtacttaaaccatccgttatcgaagaatggaaaaaatctcacaatataaagcacgtaggtcttatcacgtgcaaggcatttggtctatacaaatccattaatgtggaatatcgattcttggtaattaatagattaggtgcagatctagatgcggtgatcagagccaataataatagattaccaaaaaggtcggtgatgttgatcggaatcgaaatcttaaataccatacaatttatgcacgagcaaggatattctcacggagatattaaagcgagtaatatagtcttggatcaaatagataagaataaattatatctagtggattacggattggtttctaaattcatgtctaatggcgaacatgttccatttataagaaatccaaataaaatggataacggtactctagaatttacacctatagattcgcataaaggatacgttgtatctagacgtggagatctagaaacacttggatattgtatgattagatggttgggaggtatcttgccatggactaagatatctgaaacaaagaattgtgcattagtaagtgccacaaaacagaaatatgttaacaatactgcgactttgttaatgaccagtttgcaatatgcacctagagaattgctgcaatatattaccatggtaaactctttgacatattttgaggaacccaattacgacaagtttcggcacatattaatgcagggtgtatattattaagtgtggtgtttggttgatgtaaaatttttgtcgataaaaattaaaaaataacttaatttattattgatctcgtgtgtacaaccgaaatcatggcgatgttttacgcacacgctctcggtgggtacgacgagaatcttcatgcctttcctggaatatcatcgactgttgccaatgatgtcagtttataataacaagtatgacattgtaaaagacaaatatatgtggtgttacagtcaggtgaacaagagatatattggagcactgctgcctatgtttgagtgcaatgaatatctacaaattggagatccgatccatgatcaagaaggaaatcacatatcgccacaaaaactactatgctctaagcggaatcgggtacgagagtctagacttgtgtttggaaggagtagggattcatcatcacgtacttgaaacagaaaacgctgtatatggaaaagttcaacatgattattctactatcaaagagaaggccaaagaaatgaatgcactcagttcaggacctatcatcgattaccacgtctggataggagattgtatctgtcaagttactgctgtggacgtacatggaaaggaaattatgagaatgagattcaaaaagggtgcggtgcttccgatcccaaatctggtaaaagttaaacttggggagaatgatacagaaaatctttcttctactatatcggcggcaccatcgaggtaaccacctctctggaagacagtgtgaatcatgtactcatgaaacgtttggaatctatacgccatatgtggtctgttgtatatgatcattttgatattgtgaatggtaaagaatgctgttatgtgcatacgcatttgtctaatcaaaatcttataccgagtactgtaaaaacaaatttgtacatgaagactatgggatcatgcattcaaatgagtatcttagcgaactgaaggaatcaggtggatggagtcccagaccagaaatgcaggaatttgaatatccagatggagtggaagacactgaatcaattgagagattggtagaggagttcttcaatagatcagaacttcaggctggtaaatctattaatgttaaacatacatctgtttcagctaagcaactaagaacacgtatactctcatcttttgccaacacagagggtggatatttgttcattggagttgataataatacacacaaagtatttggattcacggtgggttacgactacctcagactgatagagaatgatatagaaaagcatatcaaaagactttgtgttgtgtatttctgtgagaagaaagaggacatcaagtacacgtgtcgattcatcaaggtatataaacctggggatgaggctacctcgacatacgtgtgcgctatcaaagtggaaagatgctgttgtgctgtgtttgcagattggccagaatcatggtatcaagaagtattctccagatgaataggtgtcacatataaaattttaattaatgtaactatagagaacaaataataggttgtaatatcatatagacaataactaacaattaattagtaactgttatctctttttaactaactaactatacctattaatacatcgtaattatagttcttaacatctattaatcattgattcgcttctttaattttttataaaccaacattgttaattgaaaagggataacatgttacagaatataaattatatatggattttttttaaaaaggaaatacttgactggagtgtatatttatctcttcattatatagcacgcgtgttttccaatttttccacatcccatataatacaggattataatctcgttcgaacatacgagaaagtggataaaacaatagttgattttttatctaggttgccaaatttattccatattttagaatatggggaaaatattctacatatttattctatggatgatgctaatacgaatattataattttttttctagatagagtattaaatattaataagaacgggtcatttatacacaatctcaggttatcatcatccattaatataaaagaatatgtatatcaattagttaataatgatcatccagataataggataagactaatgcttgaaaatggacgtagaacaagacattttttgtcctatatatcagatacagttaatatctatatatgtattttatatagatgccgaagacagttacggttgtacattattacatagatgtatatatcactataagaaatcagaatcagaatcagaatcatacaatgaattaattaagatattgttaaataatggatcagatgtagataaaaaagatacgtacggaaacacaccttttatcctattatgtaaacacgatatcaacaacgtggaattgtttgagatatgtttagagaatgctaatatagactctgtagactttaatagatatacacctcttcattatgtctcatgtcgtaataaatatgattttgtaaagttattaatttctaaaggagcaaatgttaatgcgcgtaataaattcggaactactccattttattgtggaattatacacggtatctcgcttataaaactatatttggaatcagacacagagttagaaatagataatgaacatatagttcgtcatttaataatttttgatgctgttgaatctttagattatctattatccagaggagttattgatattaactatcgtactatttacgacgctgtcagttataatgcgtataatacgttggtctatctattaaacagaaatggtgattttgagacgattactactagtggatgtacatgtatttcggaagcagtcgcaaacaacaacaaaataataatggaagtactattgtctaaacgaccatctttgaaaattatgatacagtctatgatagcaattactaaacataaacagcataatgcagatttattgaaaatgtgtataaaatatactgcgtgtatgaccgattatgatactcttatagatgtacaatcactacagcaatataaatggtatattttaagatgtttcgatgaaatagatatcatgaagagatgttatataaaaaataaaactgtattccaattagttttttgtatcaaagacattaatactttaatgagatacggtaaacatccttctttcgtgaagtgcactagtctcgacgtatacggaagtcgtgtacgtaatatcatagcatctattagatatcgtcagagattaattagtctattatccaagaagctggatcctggagataaatggtcgtgttttcctaacgaaataaaatataacgataacgaactgtccacatatctaaaaatcttataaacactattaaaatataaaatcacactacatcattgtttccttttagtgctcgacagtgtatactatttttaacgctcataaataaaaatgaaaacgatttccgttgttacgttgttatgcgtactacctgctgttgtttattcaacatgtactgtacccactatgaataacgctaaattaacgtctaccgaaacatcgtttaataataaccagaaagttacgtttacatgtgatcagggatatcattcttcggatccaaatgctgtctgcgaaacagataaatggaaatacgaaaatccatgcaaaaaaatgtgcacagtttctgattacatctctgaactatataataaaccgctatacgaagtgaattccaccatgacactaagttgcaacggcgaaacaaaatattttcgttgcgaagaaaaaaatggaaatacttcttggaatgatactgttacgtgtcctaatgcggaatgtcaacctcttcaattagaacacggatcgtgtcaaccagttaaagaaaaatactcatttggggaatatataactatcaactgtgatgttggatatgaggttattggtgcttcgtacataagttgtacagctaattcttggaatgttattccatcatgtcaacaaaaatgtgatataccgtctctatctaatggattaatttccggatctacattttctatcggtggcgttatacatcttagttgtaaaagtggttttatactaacgggatctccatcatccacatgtatcgacggtaaatggaatcccatactcccaacatgtgtacgatctaacgaaaaatttgatccagtggatgatggtcccgacgatgagacagatttgagcaaactctcgaaagacgttgtacaatatgaacaagaaatagaatcgttagaagcaacttatcatataatcatagtggcgttaacaattatgggcgtcatatttttaatctccgttatagtattagtttgttcctgtgacaaaaataatgaccaatataagttccataaattgctaccgtgaatataaatccgttaaaataatgaataattaataattaataatttaataacaaacaagtatcaaaagattaaagacttatagctagaatcaattgagatgtcttcttcagtggatgttgatatctacgatgccgttagagcatttttactcaggcactattataacaagagatttattgtgtatggaagaagtaacgccatattacataatatatacaggctatttacaagatgcgccgttataccgttcgatgatatagtacgtactatgccaaatgaatcacgtgttaaacaatgggtgatggatacacttaatggtataatgatgaatgaacgcgatgtttctgtaagcgttggcaccggaatactattcatggaaatgtttttcgattacaataaaaatagtatcaacaatcaactaatgtatgatataattaatagcgtatctataattctagctaatgagagatatagaagcgcttttaacgacgatggtatatacatccgtagaaatatgattaacaagttgtacggatacgcatctctaactactattggcacgatcgctggaggtgtttgttattatctgttgatgcatctagttagtttgtataaataattatttcaatatactagttaaaattttaagattttaaatgtataaaaaactaataacgtttttatttgtaataggtgcattagcatcctattcgaataatgagtacactccgtttaataaactgagtgtaaaactctatatagatggagtagataatatagaaaattcatatactgatgataataatgaattggtgttaaattttaaagagtacacaatttctattattacagagtcatgcgacgtcggatttgattccatagatatagatgttataaacgactataaaattattgatatgtctactattcaacgcagaggtcacacgtgtagaatatctaccaaattatcatgccattatgataagtacccttatattcacaaatatgatggtgatgagcgacaatattctattactgcagagggaaaatgctataaaggaataaaatatgaaataagtatgatcaacgatgatactctattgagaaaacatactcttaaaattggatctacttatatatttgatcgtcatggacatagtaatacatattattcaaaatatgatttttaaaaatttaaaatatattatcacttcagtgacagtagtcaaataacaaacaacaccatgagatatattataattctcgcagttttgttcattaatagtatacacgctaaaataactagttataagtttgaatccgtcaattttgattccaaaattgaatggactggggatggtctatacaatatatcccttaaaaattatggcatcaagacgtggcaaacaatgtatacaaatgtaccagaaggaacatacgacatatccgcatttccaaagaatgatttcgtatctttctgggttaaatttgaacaaggcgattataaagtggaagagtattgtacgggaccaccgactgtaacattaactgaatacgacgaccatccgtatgctactagaggtagcaaaaagattcctatttacaaacgcggtgacatgtgtgatatctacttgttgtatacggctaacttcacattcggagattctaaagaaccagtaccatatgatatcgatgactacgattgcacgtctacaggttgcagcatagactttgtcacaacagaaaaagtgtgcgtgacagcacagggagccacagaagggtttctcgaaaaaattactccatggagttcgaaagtatgtctgacacctaaaaagagtgtatatacatgcgcaattagatccaaagaagatgttcccaatttcaaggacaaaatggccagagttatcaagagaaaatttaactaaatttctcggtagcacatcaaatgatgttaccacttttcttagcatgcttaacttgactaaatattcataactaatttttattaatgatacaaaaacgaaataaaactgcatattatacactggttaacgcccttataggctctaaccattttcaagatgaggtccctgattatagtccttctgttcccctctatcatctactccatgtctattagacgatgtgagaagactgaagaggaaacatggggattgaaaatagggttgtgtataattgccaaagatttctatcccgaaagaactgattgcagtgttcatctcccaactgcaagtgaaggcaatggattcagggatatacgaaacaccgataaattataaaaaaagcaatgtgtccgctgtttccgttaataatactattttcgtaactggcggattattcataaataactctaatagcacgatcgtggttaacaatatggaaaaacttgacatttataaagacaaacaatggtcgattatagaaatgcctatggctagggtatatcacggcatcgactcgacatttggaatgttatattttgccggaggtctatccgttaccgaacaatatggtaatttagagaaaaacaacgagatatcttgttacaatcctagaacgaataagtggtttgatatttcatatactatttataagatatccatatcatcattgtgtaaactaaataacgtcttctatgtatttagtaaggacattggatatgtggaaaagtatgatggtctccccgctataaaggcattatcaacttctccttattgattgaaaatgaaaatataaatagtttttatgtatagcagtattaccctatagttttattgcttactactaacatggatacagatacagatgttacaaatgtagaagatatcatgaatgaaatagatagagagaaagaagaaatactaaaaaatgtagaaattgaaaataataaaaacattaacaagaatcatcccaatgaatatattagagaagcactcgttattaatacaagtagtaatagtgattccattgataaagaagttatagaatgtatcagtcacgatgtaggaatatagatcatatctactaatttttataatcaatacaaaacataaaaaacaactcgttattacatagcaggcatggaatccttcaagtattgttttgataacgatggcaagaaatggattatcggaaatactttatattctggtaattcaatactctataaggtcagaaaaaatttcactagttcgttctacaattacgtaatgaagatagatcacaaatcacacaagccattgttgtctgaaatacgattctatatatctgtattggatcctttgactatcgacaactggacacgggaacgtggtataaagtatttggctattccagatctgtatggaattggagaaaccgatgattatatgttcttcgttataaagaatttgggaagagtattcgccccaaaggatactgaatcagtcttcgaagcatgcgtcactatgataaacacgttagagtttatacactctcgaggatttacccatggaaaaatagaaccgaggaatatactgattagaaataaacgtctttcactaattgactattctagaactaacaaactatacaagagtggaaactcacatatagattacaacgaggacatgataacttcaggaaatatcaattatatgtgtgtagacaatcatcttggagcaacagtttcaaaacgaggagatttagaaatgttgggatattgcatgatagaatggttcggtggcaaacttccatggaaaaacgaaagtagtataaaagtaataaaacaaaaaaaagaatataaaaaatttatagctactttctttgaggactgttttcctgaaggaaatgaacctctggaattagttagatatatagaattagtatacacgttagattattctcaaactcctaattatgacagactacgtagactgtttatacaagattgaaatattctttttttatagagtgtggtagtgttacggatatctaatattaatattagactatctctatcgcgctacacgaccaatatcgattactatggatatcttctatgaaaggagagaatgtattcatttctccagcgtcaatctcgtcagtattgacaatactgtattatggagctaatggatccactgctgaacagctatcaaaatatgtagaaaaggaggagaacacggataaggttagcgctcagaatatctcattcaaatccatgaataaagtatatgggcgatattctgccgtgtttaaagattcctttttgagaaaaattggcgataagtttcaaactgttgacttcactgattgtcgcactatagatgcaatcaacaagtgtgtagatatctttactgaggggaaaatcaatccactattggatgaacaattgtctcctagcaattagtgccgtatactttaaagcaaaatggttgacgccattcgaaaaggaatttaccagtgattatcccttttacgtatcaccaacggaaatggtagacgtaagtatgatgtctatgtacggcgagctatttaatcacgcatctgtaaaagaatcattcggtaacttttcaatcatagaactgccatatgttggagatactagtatgatggtcattcttccagacaagattgatggattagaatccatagaacaaaatctaacagatacaaattttaagaaatggtgtaactctctggaagctacgtttatcgatgttcacattcccaagtttaaggtaacaggctcgtataatctggtggatactctagtaaagtcaggactgacagaggtgttcggttcaactggagattatagcaatatgtgtaatttagatgtgagtgtcgacgctatgatccacaaaacgtatatagatgtcaatgaagagtatacagaagcagctgcagcaacttgtgcactggtgtcagactgtgcatcaacaattacaaatgagttctgtgtagatcatccgttcatctatgtgattaggcatgttgatggaaaaatttttttcgttggtagatattgctctccgacaactaattgttaaccattttttttaaaaaaatagaaaaaacatgtggtattagtgcaggtcgttattcttccaattgcaattggtaagatgacggccaactttagtacccacgtcttttcaccacagcactgtggatgtgacagactgaccagtattgatgacgtcaaacaatgtttgactgaatatatttattggtcgtcctatgcataccgcaacaggcaatgcgctggacaattgtattccacactcctctcttttagagatgatgcggaattagtgttcatcgacattcgcgagctggtaaaaaatatgccgtgggatgatgtcaaagattgtgtagaaatcatccgttgttatataccggatgagcaaaaaaccatcatcggactttgtgcatatgctgctacttactggggaggtgaagaccatcccactagtaacagtctgaacgcattgtttgtgatgcttgagatgctaaattacgtggattataacatcatattccggcgtatgaattgatgagttgtacatcttgacattttcttctttcttctcttctccctttcccagaaacaaactttttttacccactataaaataaaatgagtatactacctgttatatttctttctatatttttttattcttcattcgttcagacttttaacgcgcctgaatgtatcgacaaagggcaatattttgcatcattcatggagttagaaaacgagccagtaatcttaccatgtcctcaaataaatacgctatcatccggatataatatattagatattttatgggaaaaacgaggagcggataatgatagaattataccgatagataatggtagcaatatgctaattctgaacccgacacaatcagactctggtatttatatatgcattaccacgaacgaaacctactgtgacatgatgtcgttaaatttgacaatcgtgtctgtctcagaatcaaatatagatcttatctcgtatccacaaatagtaaatgagagatctactggcgaaatggtatgtcccaatattaatgcatttattgctagtaacgtaaacgcagatattatatggagcgggcatcgacgccttagaaataagagacttaaacaacggacacctggaattattaccatagaagatgttagaaaaaatgatgctggttattatacatgtgttttagaatatatatacggtggcaaaacatataacgtaaccagaattgtaaaattagaggtacgggataaaataataccttctactatgcaattaccagaaggtgttgtaacttcaataggtagtaatttgactattgcgtgtagagtatcgttgagacctcccacaacggatgcagacgtcttttggataagtaatggtatgtattacgaagaagatgatggggacggagacggtagaataagtgtagcaaataaaatctatatgaccgataagagacgtgttattacatcccggttaaacattaatcctgtcaaggaagaagatgctacaacgtttacgtgtatggcgtttactattcctagcatcagcaaaacagttactgttagtataacgtgaatgtatgttgttacatttccatgtcaattgagtttataagaatttttatacattatcttccaacaaacaattgacgaacgtattgctatgattaactcccacgatactatgcatattattaatcattaacttgcagactatacctagtgctattttgacatactcatgttcttgtgtaattgcggtatctatattattaaagtacgtaaatctagctatagttttattatttaattttagataatataccgtctccttatttttaaaaattgccacatcctttattaaatcatgaatgggaatttctatgtcatcgttaatatattgtgaacaacaagagcagatatctataggaaagggtggaatgcgatacattgatctatgtagttttaaaacacacgcgaactttgaagaatttatataaatcattccatcgatacatccttctatgttgacatgtatatatccaggaattcttttattaatgtcaggaaatgtataaactaaaacattgcccgaaagcggtgcctctatctgcgttatatccgttcttaacttacaaaatgtaaccaatacctttgcatgacttgttttgttcggcaacgttagtttaaacttgacgaatggattaattacaatagcatgatccgcgcatctattaagtttttttactttaacgcccttgtatgtttttacagagactttatctaaatttctagtgcttgtatgtgttataaatataacgggatatagaactgaatcacctaccttagatacccaattacattttatcagatccagataataaacaaattttgtcgccctaactaattctatattgttatatattttacaattggttatgatatcatgtaataacttggagtctaacgcgcatcgtcgtacgtttatacaattgtgatttagtgtagtatatctacacatgtatttttccgcactatagtattctggactagtgataaaactatcgttatatctgtcttcaatgaactcatcgagatattgctctctgtcatattcatacacctgcataaactttctagacatcttacaatccgtgttattttaggatcatatttacatatttacgggtatatcaaagatgttagattagttaatgggaatcgtctataataatgaatattaaacaattatatgaggacttttaccacaaagcatcataaaaatgagtcgtcgtctgatttatgttttaaatatcaaccgcgaatcaactcataaaatacaagagaatgaaatatatacatattttagtcattgcaatatagaccatacttctacagaacttgattttgtagttaaaaactatgatctaaacagacgacaacctgtaactgggtatactgcactacactgctatttgtataataattactttacaaacgatgtactgaagatattattaaatcatggagtggatgtaacgatgaaaaccagtagcggacgtatgcctgtttatatattgcttactagatgttgtaatatttcacatgatgtagtgatagatatgatagacaaagataaaaaccacttatcgcatagagactattccaacctactactagagtatataaaatctcgttacatgttattgaaggaagaggatatcgatgagaacatagtatccactttattagataagggaatcgatcctaactttaaacaagacggatatacagcgttacattattattatttgtgtctcgcacacgtttataaaccaggtgagtgtagaaaaccgataacgataaaaaaggccaagcgaattatttctttgtttatacaacatggagctaatctaaacgcgttagataattgtggtaatacaccattccatttgtatcttagtattgaaatgtgtaataatattcatatgactaaaatgctgttgacttttaatccgaatttcaaaatatgtaataatcatggattaacgcctatactatgttatataacttccgactacatacaacacgatattcttgttatgttaatacatcactatgaaacaaatgttggagaaatgccgatagatgagcgtcgtataatcgtattcgagtttatcaaaacatattctacacgtccggcagattcgataacttatttgatgaataggtttaaaaatatagatatttatacccgctatgaaggaaagacattattacacgtagcatgtgaatataataatacacacgtaatagattatcttatacgtatcaacggagatataaatgcgttaaccgacaataacaaacacgctacacaactcattatagataacaaagaaaattccccatataccattaattgtttactgtatatacttagatatattgtagataagaatgtgataagatcgttggtggatcaacttccatctctacctatcttcgatataaaatcatttgagaaattcatatcctactgtatacttttagatgacacattttacaatagacacgttaggaatcgcaattctaaaacgtatcgatacgcattttcaaaatacatgtcgtttgataaatacgatggtataataactaaatgtcataaagaaacaatattgctcaaactatccactgttctagacactacactatatgcagttttaagatgccataattcgaaaaagttaagaagatacctcaacgagttaaaaaaatataataacgataagtcctttaaaatatattctaatattatgaatgagagataccttaatgtatattataaagatatgtacgtgtcaaaggtatatgataaactatttcctgttttcacagataaaaattgtctactaacattactaccttcagaaattatatacgaaatattatacatgctgacaattaacgatctttataatatatcgtatccacctaccaaagtatagttgtatttttctcatgcgatgtgtgtaaaaaaactgatattatataaatattttagtgccgtataatgaagatgacgatgaaaatgatggtacatatatatttcgtatcattattgttattgctattccacagttacgccatagacatcgaaaatgaaatcacagaattcttcaataaaatgagagatactctaccagctaaagactctaaatggttgaatccagcatgtatgttcggaggcacaatgaatgatatagccgctctaggagagccattcagcgcaaagtgtcctcctattgaagacagtcttttatcgcacagatataaagactatgtggttaaatgggagaggctagaaaaaaatagacggcgacaggtttctaataaacgtgttaaacatggtgatttatggatagccaactatacatctaaattcagtaaccgtaggtatttgtgtaccgtaactacaaagaatggtgactgtgttcagggtatagttagatctcatattaaaaaacctccttcatgcattccaaaaacatatgaactaggtactcatgataagtatggcatagacttatactgtggaattctttacgcaaaacattataataatataacttggtataaagataataaggaaattaatatcgacgatattaagtattcacaaacgggaaagaaattaattattcataatccagagttagaagatagtggaagatacaactgttacgttcattacgacgacgttagaatcaagatgtaaaatacttacggttataccgtcgcaagaccacaggtttaaactaatactagatccaaaaatcaacgtaacgataggagaacctgccaatataacatgcactgctgtgtcaacgtcattattgattgacgatgtactgattgaatgggaaaatccatccggatggcttataggattcgattttgatgtatactctgttttaactagtagaggcggtatcaccgaggcgaccttgtactttgaaaatgttactgaagaatatataggtaatacatataaatgtcgtggacacaactattattttgaaaaaacccttacaactacagtagtattggagtaaatacacaatgcatttttatatacattactgaataattattattattatttatatcgtatttgtgctataacgcgactatctaggtatttgtatctcaccgatagagaacatataaatgtagactctattaaacagttgtgtaaaatatcagatcctaatagatgtggatgtacggctttagaaatgagttcattaaaatatgtgatatcaacggaacatatttatataattatactattgctgttagtataattattgattccacggaagaactaccaacagttactccaattacaacaacatataattatactatcgatgatagcactactgaagaactacaagtgactcctcatatggatctccatcgatgatacatgtattaaaatactttccgaataagtcttttaaatattgtattaattatgaaaaactatgctatgcgagtatgatacgatactagattttatctctagcgagagatgtcgttagaatcatttatcaacgaatatcgataacatgtgtcatttatacgttaaagtctgtccgtcttctctattgtttagactgtttgtagaatgctgtgatataaacaaactagtagacacaaatatttaactcatgatgaagttgagaatgatatgctttagctaatataaaaatatattaatccactatatattctagacttgatttaaaaccgataaactactactacgtactgtataagttaggagcagaccctaattatgtagatgatagaggtaatacttctgcatctatatgtccacttatgagaaaacgtcatttaataagatgcatcgtgaaaagaaatttattaaagagttggtaaaatatgaaaccgaaagtaaataatataggaaatacacctctacataactacgtatctcaatatgatatcactctcattcctcatccacaacccattaaaaaatggaaattaaagccctctattagcataaacggctacaggtctacctttacaatggcctttccttgtgcccagttcagaccctgtcattgccacgctactaaggactccctgaataccgtggccgacgtcagacattgtctgactgaatacatcctgtgggtttctcatagatggacccatagagaaagcgcagggtctctctacaggcttctcatctctttcagaactgatgcaacggagctctttggtggtgagttgaaggattcacttccgtggagatcattaaatgactccatgaaaaccgccgaagaacttcgtgcaatcattggactttgtactcaatcagctatcgtctctggaagagtcttcaacgataagtatatcgacatactacttatgctgcgaaagattctgaacgagaacgactatctcaccctcttggatcatatccgcactgctaaatactaaatctccttcatgctctctcactacactttttatcatcttatgaggaataattagcaccagaatagctatggattgcacatgtattctatgtcgtctactggatgaagatgtgacgtacaaaaaaataaaactagaaattgaaacgtgtcacaacttatcaaaacatatagatagacgaggaaacaatgcgctacattgttacgtctccaataaatgcgatacagacattaagattgttcgactgttactctctcgcggagtcgagagactttgtagaaacaacgaaggattaactccgctaggagcatacagtaagcatagatacgtaaaatctcagattgtgcatctactgatatccagctattcgaattcctctaacgaactcaagtcgaatataaatgatttcgacttacgtctgctaaaatacctaattgtggataaacggatacgtccgtccaagaatacgaattatgcaatcaatggtctcggattggtggatatatacgtaacgacgcctaatccgagaccagaagtattgctatggcttcttaaatcagaatgttacagcaccggttacgtatttcgtacctgtatgtacaacagtgatatgtgtaagaactctcttcattactatatatcgtctcatagagaatctctatccaaggatgtaattaaatgtttgatcgataacaatgtttccatccaatactactggtcttgctcaaccatagatatagagattattaataaaggatgtggacacgtgtagagtatacgacgtcagccctatattagaggcgtattatctaaacaagcgatttagagtaaccccatataatgtagacatggaaatcgttaatcttcttattgagagacgtcatactcttgtcgacgtaatgcgtagtattacttcgtacgattccagagaatataaccactacatcatcgataacattctaaagagatttagacaacaggatgaatccatcgtacaagccatactgataaactacttacattacggcgatatggtaagtatacctatcattcaatgcatgttggataagacgacggacaacaactttgttaataataatctcgtcgatgtaaacgtcgtaaggtttatcgtggaaaatatggacacgcggctgtaaatcacatatctaacaatggccgtctatgtatgtacggtctgatattatcgagatttaataattgcgggtatcactgttatgaagatgtatttgatatactaagcaagtacatggatgatatagatatgatcgataactctactatattacgcggtcgatgtcaataatatacaatttgcaaagcggttattggaatatggagcgagtgtcacgctcgataatcaatacggccatccagaaaagcagttaccaaagagaagctagttgatttattactgagttaccatcccactctagagactatgattgacgcatttaatagagatatacgctatctatatcctgaaccattattcgcctgtatcagatacgccttaatcctagatgatgattttccttctaaagtaagtatgatatcgccggtcgtcataaggaactaaagcgctatagagcagacattaatagaatgaagaatgcctacatatcaggcgtctccatgtttgatatattatttaaacgaagcaaacgccacagattgagatacgcaaagaacaatgagaggatcgactccattaaataatttatcatggagtgataatgtcctgtttccatggcatattacaaaatcgattccgtccaagatgataaaaacatttaccggcatcataaacacggagtttattttatatgtctcgcataaacattactaaaaaaatatattgttcggttttctttcacatctttaattatgaaaaagtaaatcattatgagatggacgcatcgttcgcgacagtatgtggtacatacctaacgtatttatggacgacggtaagaatgaaggtcacgtttctgtcaacaatgtcgacgcgatcgtgtaacacgactcacaatagaatctgtgaatgctctcccgatcatggatgcaaggcatgtgtttcccaaacaaaatgtggaataggatacggagtatccggagacgtcatctgttctccgtgtggtctcggaacatattctcacaccgtctcttccgcagataaatgcgaacccgtacccagaaatacctttaactatatcgatgtggaaattaacctgtatccagttaacgacacatcgtgtactcggacgaccactaccggtctcagcgaatccatctcaacgtcggaactaactattactatgaatcataaagactgcgatcccgtcttcttaataaggtagcgacttcaggtttctttacaggagaaaggtgtgcactctgaatttcgagattaaatgcaataacaaagattcttcctccaaacagttaacgaaagcaaagaatgatactatcatgccgcattcggagacagtaactctagcgtcgacatctatatactatatagtaataccaatactcaagactacgaaactgatacaatctcttatcatgtgggtaatgtagccatatgcccggtagttgcgatatacataaactgatcactaattccaaacccacccgctttttatagtaagtttttcacccataaatacaataattaatttctcgtaaaagtagaaaatatattctaatttattgcacggtaaggaagtagaatcataaagaacagtactcaatcaatagcaatcatgaaacaatatatcgtactggcatgcatgtgcctgccagtcttcagcaatcatcctcatcgtgtacggaagaagaaaacaaacatcatatgggaatcgatgttattatcaaagtcacaaagcaagaccaaacaccgaccgatgataagatttgccaatccgtaacggaaattacagagtccgagtcagatccagatcccgaggtggaatcagtcgaggatgtagatcctcctaccacttattactccatcatcggtggaggtctgagaatgaactttggattcaccaaatgtcctcagattaaatccatctcagaatccgctgatggaaagactgtgaggtgtctatcgacatcagatgtagcgaagaagagaaagacagcgacatcaagacccatccagtactcgggtctaacatctctcataagaaagtgagttacgaagatatcatcggttcaacgatcgtcgatacaaaatgtgtcaagaatctagagtttagcgttcgtatcggagacatgtgcaaggaatcatctgaacttgaggtcaagtatgtcgacggatcggcatctgaaggtgcaaccgatgatacttcactcatcgattcaacaaaactcaaagcgtgtgtctgaatcgataactctattcatctgaaattggatgagtagggttaatcgaacgattcaggcacaccacgaattaaaaaagtgtaccggacactatattccggtttgcaaaacaaaaagttacctctcgcgacttcttctttttctgtctcaatagtgtgatacgattatgacactattcctatttcctttcagggtat

SEQ ID NO: 34 - DNA, 20 bp, synthetic construct
  source 1..20: mol_type = other DNA
gaccccaaaatcagcgaaat

SEQ ID NO: 35 - DNA, 24 bp, synthetic construct
  source 1..24: mol_type = other DNA
tctggttactgccagttgaatctg

SEQ ID NO: 36 - DNA, 24 bp, synthetic construct
  source 1..24: mol_type = other DNA
accccgcattacgtttggtggacc

SEQ ID NO: 37 - DNA, 23 bp, synthetic construct
  source 1..23: mol_type = other DNA
cgatctcttgtagatctgttctc

SEQ ID NO: 38 - DNA, 20 bp, synthetic construct
  source 1..20: mol_type = other DNA
ggtgaaccaagacgcagtat

SEQ ID NO: 39 - DNA, 25 bp, synthetic construct
  source 1..25: mol_type = other DNA
taaccagaatggagaacgcagtggg

1. A vaccine and/or immunogenic composition for preventing or treating SARS-CoV-2 infection in a subject comprising:
(i) a single synthetic DNA fragment comprising the entire genome of a modified vaccinia Ankara (MVA), or two or more synthetic DNA fragments each comprising a partial sequence of the genome of the MVA such that the two or more DNA fragments, when transferred into a host cell, are assembled sequentially and comprise the full-length sequence of the MVA genome, and
(ii) one or more DNA sequences encoding the spike (S) protein and the nucleocapsid (N) protein of SARS-CoV-2, subunits, or fragments thereof, inserted into one or more insertion sites of the MVA, wherein the S protein and the N protein are expressed in the host cell upon transfection of the one or more MVA DNA fragments.

2. The vaccine and/or immunogenic composition of claim 1, wherein the one or more insertion sites comprise Del2, IGR69/70, and Del3.

3. The vaccine and/or immunogenic composition of claim 1, wherein the one or more DNA sequences encoding the S protein and the N protein are under the control of an mH5 promoter.

4. The vaccine and/or immunogenic composition of claim 1, wherein the DNA sequence encoding the S protein is based on the Wuhan-Hu-1 reference strain or is derived from a variant of concern (VOC).

5. The vaccine and/or immunogenic composition of claim 1, wherein the DNA sequence encoding the N protein is based on the Wuhan-Hu-1 reference strain or is derived from a variant of concern (VOC).

6. The vaccine and/or immunogenic composition of claim 4, wherein the VOC is selected from the group consisting of B.1.1.7 (Alpha), B.1.351 (Beta), P.1 (Gamma), B.1.617.2 (Delta), B.1.621 (Mu), C.37 (Lambda), C.1.2, BA.1 (Omicron), BA.2 (Omicron), BA.2.12.1 (Omicron), BA.4 (Omicron), BA.5 (Omicron), BA.2.75 (Omicron), BQ.1 (Omicron), BQ.1.1 (Omicron), and XBB (Omicron).

7. The vaccine and/or immunogenic composition of claim 1, wherein the DNA sequence encoding the S protein comprises a nucleotide sequence that is at least 80% identical to any one of SEQ ID NOs: 5, 9, 11, 13, 15, 21, 25, and 29.

8. The vaccine and/or immunogenic composition of claim 1, wherein the DNA sequence encoding the N protein comprises a nucleotide sequence that is at least 80% identical to any one of SEQ ID NOs: 7, 17, 19, 23, 27, and 31.

9. A vaccine and/or immunogenic composition for preventing or treating SARS-CoV-2 infection in a subject comprising a synthetic modified vaccinia Ankara (sMVA) vector comprising a nucleotide sequence that is at least 80% identical to SEQ ID NO: 33.

10. The vaccine and/or immunogenic composition of claim 9, further comprising a pharmaceutically acceptable carrier, adjuvant, additive, or combination thereof.

11. A method of preventing, treating SARS-CoV-2 infection, or eliciting an immune response to SARS-CoV-2 in a subject comprising administering a prophylactically or therapeutically effective amount of a vaccine and/or immunogenic composition to the subject, wherein the vaccine and/or immunogenic composition comprises:
(i) a single synthetic DNA fragment comprising the entire genome of a modified vaccinia Ankara (MVA), or two or more synthetic DNA fragments each comprising a partial sequence of the genome of the MVA such that the two or more DNA fragments, when transferred into a host cell, are assembled sequentially and comprise the full-length sequence of the MVA genome, and
(ii) one or more DNA sequences encoding the spike (S) protein and the nucleocapsid (N) protein of SARS-CoV-2, subunits, or fragments thereof, inserted into one or more insertion sites of the MVA, wherein the S protein and the N protein are expressed in the host cell upon transfection of the one or more MVA DNA fragments.

12. The method of claim 11, wherein the subject is infected with SARS-CoV-2 or is at risk of being infected with SARS-CoV-2.

13. The method of claim 11, wherein the SARS-CoV-2 comprises the Wuhan-Hu-1 reference strain or a VOC.

14. The method of claim 13, wherein the VOC is selected from the group consisting of B.1.1.7 (Alpha), B.1.351 (Beta), P.1 (Gamma), B.1.617.2 (Delta), B.1.621 (Mu), C.37 (Lambda), C.1.2, BA.1 (Omicron), BA.2 (Omicron), BA.2.12.1 (Omicron), BA.4 (Omicron), BA.5 (Omicron), BA.2.75 (Omicron), BQ.1 (Omicron), BQ.1.1 (Omicron), and XBB (Omicron).

15. The method of claim 11, wherein the vaccine and/or immunogenic composition is administered by intramuscular injection, intranasal instillation, intradermal injection, and/or scarification.

16. The method of claim 11, wherein a single dose of the vaccine composition is administered.

17. The method of claim 11, wherein two doses of the vaccine composition are administered.

18. The method of claim 11, wherein three or more doses of the vaccine composition are administered.

19. The method of claim 11, wherein one booster dose of the vaccine and/or immunogenic composition is administered.

20. The method of claim 11, wherein two or more booster doses of the vaccine and/or immunogenic composition are administered.
